United States Patent Application Publication US 2012/0107916 A1 - sequence listing, part 4

SEQ ID NO: 15 - DNA, 3940880 bp, Clostridium acetobutylicum (residues 1-1,970,440 of 3,940,880)
tcaagaaaaacgattctgccaacctttagcaatgagattttattccttacatattaaatttttcacttctgttgataaattattcacataaaaaaaactttttgtggataatttcttgaatacctacctgtgttttgatattattatgaaagggctgttaataacttttttaaaaacaagttatacacaatctgtgcataactctgttgataacttgtttttaattttattttttttttgtttttattaattattttctcaattcaaattatgtgttaatattattactatagatttgtggataactaatttctatagagacacattaacatttttatgcacatgtgaatattttttagtgcatatgtcaaaacatctaatgtatacttatttttgtttatatctatgttagtaacttgttgattactttatttaaaataaatttttttagacaggaggatatactatggctgcccaattaaatgaactgtggcaaaaaaccataaacataataaaaggtgaattaacggaagtaagctttaacacttggataaaaagtatcactcctatatctattgataaagatagtatacgccttagtgttccaaatcaatttacaaaggaaattctcgaaaatcgatataaagatttaataataaattctatgaaaataataactactaaaaaatatgacatagcatttttaatttcctctgaagaagctttggaaaccgatgaagatcaagaaaccgatacaaacaatgtaaatacagatactagttcttctatgcttaatccaaaatacaaatttgattcatttgtaattggtaatagtaatagatttgctcatgctgcatgccttgctgttgctgaagctcctgcaaaagcctacaatccattatttatatatggaggagttggacttggaaagactcatcttatgcaagctataggtcattacatacttgataataatccaaaagctaaagttgtatatgtttcttctgaaaaatttacaaatgagcttataaattcaattaaggacgacaaaaacgttgaatttagaaacaaatacagaaatgtggatgtgcttttaattgatgatgttcagttcatagccggtaaagagcggactcaagaagaattttttcataccttcaatgctctacatgaaaataacaaacaaattatactctccagtgatagaccacctaaggaaatacctacattggaggataggttgcgttcaagatttgaatggggtttaatagcagatatacaagcacctgattttgaaacaagaattgcaattcttaagaaaaaagccgatgttgagcatttaaacatacctaatgacgttatggtatacatagcaactcaaataaaatcaaatataagagagcttgaaggtgcacttataagaatagttgcattttcatctcttacgaataaagagataagtgtagatttagcatctgaggcacttaaggatattatctctagtaaacaaaataagcagataactatagatttaatccaagatgtagtctctagctattttaatttaagaatagaggactttaaatcagctaggcgtacaaaaaatatagctttcccacgccaaattgcaatgtatctttctagaaaactaactgatatgtccttgcctaagataggagaagcgtttggaggaagagaccatacaactgtaattcatgcatatgaaaaaatctcttctgctttaaaagaagatgatgacttaaaatatacaataaatgagattacaaagagattctctccaaaataataacagttgtttattatttatctataataaattgtggatactttttatattttactttgcatgttaatactgttgataacgtaaagtagttgttaataaattatccacagttatttttttcttgcaaaccttgatatttgttgagtttatccacttatcaacaaatccacactccctactactattactacttagtttttattataccttatctacttttctattctttataattgttaataaggaggatattataatgaaatttatatgtgaaaaaaatatattacaagaagcaattattacagctcaaaaagctgttacaggaaaatcaacaatgccagtattacaaggtatactcatgagtgttcaaaataacgaattaactttaattggttctgatatagatttaagtattgaaactaaaataaatgtagaagttttagaagaaggtaaagttgttttagatgctaggcttttaagtgaaataattagaaagctgcctaattccaaggttgagatacaaactattgagaataattgtgttgaaataacttgtaataaatcaaagctaacacttgtgtatctaaatccaaatgattttccaagcttaccagagatagacgaaaactcaatcttcaaaataaatcaaaaaacattaaaaactatgataaaaggtactatatttgctattgctcaggatgaaacaaggcctatattaacaggcgttttatttgaaataaaagatagcaaattaaatttagttgctattgatgggtataggctagctttaagaagccaatacatagataacgaaaccagtataaatgcagtaattccaggaaaaacactaaatgaagttattaaaattttagaggatgatggtgatgtaaatattacatttacttctaaccatatattattcaatcttggaaatactaagataatatcaagactacttgaaggtgaatttataaaatataattcaataatacctgaagaatacaacttaaatattgtggctagaaaagaagaattgttagactgcatagagagagcttcacttatggctaaggatggaaataacaatttgataaaattagacatcgaggatgatgtaatgattataacgtccaattctcaattgggaaacgtaagagaagaaataaatataattttgcaaggtcagcctttgaaaattgcatttaactcaaaatatttaatagatgtgcttaaaatcatgaatcaggaagaaattgtaatgaacttttcaagtagcataagtccttgcattattaaaaataaggaaaatgatgattccacttatttaattttgccagtaagattagctacaatctaaaatttatgtttcaggaggaaaaaagtaattatgaaagaagtaagtattaatactgaatttataaagttggattctttactcaaatggtgtggagcagtcactctaggttctgaagcaaaaatgtatatattaaatggcgacgtaaaagttaatggagaagttgaaattagaagaggtaagaaaatatataagggtgacaacgtagaatttgagggcgaaacttataaaatagtataatttagacttggaattgatacttatgttataataataggtgttattatgtatataaaaaatttatacttagataattttagaaattatgataatatagagattgactttaataaaaaagttaatattttaaccggaaataatgcgcagggaaaaacaaatatacttgaaagtatcttttattgcagccttggaaaatctcatcgcacaaataaggataaggaacttattaaatgggataaagatgaggcttttataaggttgaatttgtctaggaaaccgcttgataaaaaaatagagataaaaatatttaagggtggcaaaaaaggcataaatataaattcgataaaattaaaaaagatatctgagttgtttggaatatttaacgtggttatgttttcaccagaagacttaaaaattgtaaaagaatctcctggacataggagaaagtttctggatatggagatatccaaattagatcatagatattattataagcttgtccaatataataaaatattagatcaaagaaatattatgcttagaaataaaaaatttttaaataatgatatgataagtgtttatgatgagcagctaagtaaatttggtagttctctaattgaaagcaggataaagtatttaaataagttaaatgaaaaaggtaaaataattcattcagatataaccaagggcaaagaggagattgaatttacgtatctaactcatgttaagggaagagaaaatatttcagaagaattattttctttatttaaagatagctataaaagagatgttgaaaagggaaatacttctgttggtccacatagggatgactttagcataaaaataaatggaatagacgctagaagctttggttcacaaggacagcaaagaacatctgttttaacaataaagtttgcttcgatacaaattataaaagagatttcgagtgagacgcctgtacttttacttgatgatgttttgtctgaattagatgaaagtaggcaagaatatatattgaactcattagaaggaatacaaacgttaataacttgtacaggtattggtgatatagagaaatatttaaaaaatgatttcaatgtatttagaattgataatggtaggattgctgaatattagtaaaataaggagggaaagtatgtttttacacttgggagaaaatgtagttgttccaataaaagacgttatcggaatttttgatattgaaacgactatgtatagtgcagatacaagtcaatttttgaggatgtcagaagaggatggatttgttgaaagaataacaaatgaggctcctaaatcctttgttattgcagaagtggataaaaagagtaaaatatttttatccccaatctcatcttcaactttaagcaaaagatcagaagttgtttacttagaaccataaaagttagagtaggaggatactaatgtcagaaaaaaatgaaatttatgatgaaagtcagatacaggttcttgaaggtctcgaagctgtaagaaaaagaccaggtatgtacataggaagtactggtacaagaggcttacatcaccttgtatacgagatagttgataatagtatagatgaagctttggccggatattgcagccatataaaagtgtttatacataaggacaattcagtaacagtatccgatgatggtagaggtatgcctataggtatacaccataaaatgaaaaagccaactgtagaggtaataatgacaattctacatgcgggtggaaaattcggaggcggagcttacagagtatcaggaggtcttcatggagttggtgcgtctgttgttaatgctttatctgaaacttgtgaagtagaagtaaaaaccgaaggacatatatggaaacaaacttatcataggggtaaggtggcatcaccttttgaaaaaataggtgatagtgatgagcacggaactaaaatatattttaaaccagaccctgaaatatttgaggatacagagtatgattatgatacattatcccaaagattgagagaattagcttttctaaataagggaataaagattgaactcactgatgaaagacatgataagaatgagatattccattatgaaggtggattaaaatcattcgtaagctacttaaatagaaacaaggaagttgtatttaaagaaccaatttatgtagaaggttcaattgattcaaattattctgttgaaatagctcttcaatacaatgatggttacaatgaaaatatattttcttttgctaataatatacacactattgagggtggaacacatcttgctggatttaaaacagcattaacaagagttataaatgattatgcaaagaaatttggatatttaaaagaaaatgataaaaacctatcaggagaagatataagagaaggacttacagcagtagtttcagttaaacttacagaacctcagtttgagggacaaacaaaaacaaagttgggaaatactgaggttagaggaattgttgatagcataataagtgaaagagtaagcacttatcttgaagaaaatcctcaaataggtaaattagttatagataaggctttagtagcatctagagcaagagaagctgctaaaaaggcaagagaaattactagaagaaagtctgttcttgaaagtacatcccttccaggaaaattagctgattgctcatcaaaggatgcagaggaatgcgaaatatatatcgttgagggagactcagcgggaggttctgcaaagcaaggaagaaatagaaggttccaagctatattgcctcttagaggtaaaataatgaacgttgagaagcaaagaatcgataagatacttaactcagaggaaataaaagctatggcaacagcttttggtggaggaataggtaaagattttgatgtatctaaattgagatatcacaagattattataatgaccgatgccgatgttgatggagcgcatataagaacacttatacttacattcttctataggtatatgacagagcttatatcagaaggtcatgtatttatagcacagccgcctttatataaagttacaaagactagaaaagaatattatgcttatagcgataaagaattagaagatgtgcttcaagatgttggtggtaaggataaaaatactgatatacagagatacaaaggtttaggagaaatgaatcctgagcagttatgggaaaccactatgaatcctgagcaaagaacgttaataaaggttaacatagaggacgctatggcagcagatgaaattttcacaatacttatgggagataaggttgatccaagaagaaaattcatagaagaaaatgctactaaagttgtaaaccttgatgtttaacacattaaaagaggtgtgatgatgtatgctaaatgaaggaaaagttttacctgtagatataagcagtgaaatgaaaaaatgttatatagattatgcaatgagcgttatagtaagccgtgcacttccagatgtaagagatggacttaagccagttcataggagaatattatattcaatgcatgaattgggtttaacacctgaaaagggatatagaaaatgcgctagaatagttggagatgttttaggtaagtatcatccgcatggagattcttctgtttatggtgctttggttagattagctcaagactttaacttaagatacacagttgttgatggtcatggaaactttggttcggttgacggtgactctgctgctgctatgagatacacagaagctaaaatgaataagatagctcttgaaatggtaagagatataggaaagaatactgttgattttattcctaactttgatggtgaagaaaaagaaccggttgttttaccatcgagatttcctaacttacttgtaaatggttcagctggtattgctgttggaatggctacaaatataccaccccataatttaggtgaagttatagatggtataacaatgcttatagataatccagaagcaacaattcttgagcttatggctcagataaaaggacctgactttcctacagcaggaataataatgggcaagtctggaataagagctgcctatgagactggtagaggaaaaataacagtaagagctaaaagtgaaatagaagttgaagataatggtaagcagaaaatcataattacagaaattccatatcaggtaaacaaggcaagactagtagaaagtattgcagaccttgttaaagataagagaattgtaggaataagtgatcttagagatgaatctgacagagatggaatgagaattgtaatagagataaaaaaggatgccaattcaaatataatattaaatcagctatataagcatactagacttcaagatacttttggaataaacatgttagctttagttgataacagaccagaagttcttaatctaaagcaaattttgcagcattatattaaattccaagagcaagttataagaagaagaactgaatttgatcttgaaaaggcttcagcaagagcacatattttagaaggtcttaaaatagcacttgatcatatagatgaggtaataagtttaataagaggttctaagacagcacaagaggcaaagttaggacttatggataagtttggactttctgaaaaacaagctcaagcgatacttgatttaaaactccaaaggttgactggtttagaaagagaaaagatagaagacgagtacaatgagctaatgaaaactatagctgaattaaaaagtattcttgctgatgaaaacaagatacttgcaataataagagatgaacttaatgagataaaagctaaatatggtgatgaaagaaagactgcaatagaaagagctgaaaatgatattgatatagaggacttaatacaggaagaaaatgttgttataactcttactcatgcaggttatataaaaagaataaatgctgatacctatacttctcaaaaaagagggggaaggggtatacaagcaatgacaacaaaagaagatgattttgttgaaaatatctttataacatcaacacataataatatattgttctttacaaacaaaggaagaatgtataagcttaaagcctatcagataccagaggctggaagagcagcaaagggaacaaatgttgttaacttattgcagcttgatccaaatgaaaaaatacaggcagttatatcaattaaagagtttgatgaggaaagcttcttagttatgtgtactaagaaaggaataataaagaagactgttgttggtatgtataaaaacataagaaaaagtggtcttattgctataaaccttaatgatgatgatgaactagtttctgttagaatcactaaaggtgatgatgatatcataattgtaacaaataaaggacttgcgataagatttaatgaagttgatgtaagacctttaggaagaaatgctcttggggtaaaaggtataactcttaaagaagatgactttgtagtaggcatggaagttcctaatcaagaaagtgatgttcttgttgtaagtgaaaatggttttggtaagagaacacatgtaggagaatataaatgtcaacacagaggtggaaagggacttataacatataaggtctcagataaaacaggaaaacttgtaggagttagaatggtagaagatggcgatgagcttatgcttataaataacttgggcatagccataagaatcaatgtttcagatatatcaactacaagcagaaatgctatgggtgtaactcttatgaggaataatggagacgagaaagttctagctctagctaaaataaataaagatgatagtgaacagcttgaggacagtgaagaagtctcagaagttcatgatgctgaagaaaataatagtgaagaataatagaatataagtatataaaactcgtgaaatggtagtgtttcacgagtttttatcttaaaatgcaaaataaactaccccgtgagtatcaatatgtgaaatataaagtataatgtaaataatagaagaaaagtatacgtattttatataaataagcaaaaagaatgaagtataagttattttatgtgataatatattacatgttgtcacgtgagtgcagcaaaatttaatcttcaaaattataaaaaaaagtagttgacaagattaaataaaaatgatattataattaagctgtctagtgcagcgaacaattgaactttgaaaattaaacagagaattaaagaaccagcaattcttttgaatagaatttattctatttaaataaatttagcgatgagctaaaggaatacagattagcatctgtattatatcaaacttttaaattgagagtttgatcctggctcaggacgaacgctggcggcgtgcttaacacatgcaagtcgagcggggaacttcggttcccagcggcggacgggtgagtaacacgtgggtaacctacctcatagtggggaatagcctttcgaaaggaagattaataccgcataatactcgagaatcgcatgattcttgagccaaaggatttattcgctatgagatggacccgcggcgcattagcttgttggtgaggtaacggctcaccaaggcttcgatgcgtagccgacctgagagggtgatcggccacattggaactgagacacggtccagactcctacgggaggcagcagtggggaatattgcacaatgggggaaaccctgatgcagcaacgccgcgtgagtgatgaaggtcttcggatcgtaaaactctgtcttatgggacgataatgacggtaccataggaggaagccacggctaactacgtgccagcagccgcggtaatacgtaggtggcaagcgttgtccggatttactgggcgtaaaggatgtgtaggcggatatttaagtgagatgtgaaatccccgggcttaacttgggggctgcatttcaaactggatgtctggagtgcaggagaggaaggcagaattcctagtgtagcggtgaaatgcgtagagattaggaagaataccagtggcgaaggcggccttctggactgtaactgacgctgaggcatgaaagcgtggggagcaaacaggattagataccctggtagtccacgccgtaaacgatgaatactaggtgtaggaggtatcgactccttctgtgccgcagttaacacaataagtattccgcctgggaagtacggtcgcaagattaaaactcaaaggaattgacggggacccgcacaagcagcggagcatgtggtttaattcgaagcaacgcgaagaaccttacctagacttgacatctcctgaattagtccgtaatggatgaagtcccttcggggacaggatgacaggtggtgcatggttgtcgtcagctcgtgtcgtgagatgttgggttaagtcccgcaacgagcgcaacccttatcattagttgctaacatttagttgagcactctagtgagactgcccgggttaaccgggaggaaggtggggatgacgtcaaatcatcatgccccttatgtctagggctacacacgtgctacaatggtggggacaaaaagatgcaataccgcaaggtggagcaaaactcaaaaccccatcccagttcggattgtaggctgaaactcgcctacatgaagccggagttgctagtaatcgcgaatcagaatgtcgcggtgaatacgttcccgggtcttgtacacaccgcccgtcacaccatgagagtcggcaacacccgaagcccgtgaggtaaccttttggaaccagcggtcgaaggtggggttgataattggggtgaagtcgtaacaaggtagccgtaggagaacctgcggctggatcacctcctttctaaggagtcgacatggaaatgtaatttccatgaaggttctttgttctctgtttaattttgagagtttaattctctctaaatttgtactttgaaaattgcatagtaatcaatatagagtaatactctaaagcaaggcaaagttaattctttgttgtttgaatttaaatatatttacttaaggtcaagctacaaagggcgcatggtgaatgccttggcactaggagccgatgaaggacgtgataagctgcgataagcttcgggtaggcgcaaatagcctgtgaaccgaagatttccgaatgaggaaactctcatgggtaaccccatgaactgtatactgaattcataggtatatagaggtaaacccggggaactgaaacatctaagtacctggaggaagagaaagaaaaatcgatttccttagtagcggcgagcgaaacggaaagagcccaaaccggaaacttgtttccggggttgcggtcagatcattaaagctttatatcttaaccgaagatttctggaaagttaaaccatagaaggtaatagtcctgtaggtaaaaagagaaaaaagcccgatctgtaccagagtaccacgagacacgtgaaaccttgtgggaagctgggaggaccacctcccaaggctaaatactacctagtgaccgatagtgaagaagtaccgtgagggaaaggtgaaaagaaccccaggaggggagtgaaatagaacctgaaaccgtgtgtccacaaccgatcaaaacacgttaatgtgtgatgatgtgctttttgtagaacgagccagcgagttacggtatgcagcaaggttaagcacttaaggtgcgcagccgaagggaaaccaagtctgaatagggcgtatagttgcatgctgtagacccgaaaccgggtgacctatccatggccagggtgaagcggaagtaaaattccgtggaggcccgaaccacaatggtgttgaaaaaccatgggatgagctgtggataggggagaaattccaatcgaactcggatatagctggttctcctcgaaatagctttagggctagcgccatgaatgagtaccggaggtagagcactgaatgaggtaggggctgacaacagttaccgaactttatcaaactccgaatgctggatacttgaatcatggtagtcagactgcgaatgataagatccgtagtcaaaagggaaacagcccagatcaccagctaaggtcccaaagtatagattaagtggtaaaggatgtgggatttctaagacaactaggatgttggctcagaagcagccatacattaaaagagtgcgtaatagctcactagtcaagagatcctgcgccgaaaatgtccggggctaaaatctaacaccgaagctgtgaacttgtacttcgtacaagtggtagaggagcatcctgtatgggctgaagtcgtaccgaaaggagcggtggactgtacaggagagagtatgctggcataagtagcgagaactaagtgagaatcttagtggtcgaaaacctaaggtttcctggggaaggttcgtccgcccagggtaagtcgggacctaagccgaggccgaaaggcgtaggtgatggacaatcggttgatattcggataccgcagaataacgttatgagaaatgggatgacgcaggaggataggatatgcgtacgttattggaagtacgtctaagcactgaggatgaaagataggaaaatccgtctttcgttaagtctggggtgtaatggtgaggtagtttactaccgaaatatctgatttcatgctgccaagaaaagtctctatccaggagctctgtgcccgtaccgcaaaccgacacaggtaggtgaggagagaatcctaagaccatcggaagaattgctgttaaggaactcggcaaattgaccccgtaacttcgggagaaggggtgcctacgagagtaggtcgcagagaataggcccaagcaactgtttatcaaaaacacaggtttctgctaaagcgaaagctgaagtataggagctgacgcctgcccggtgctggaaggttaaggggaatgcttagcgcaagcgaaggcatgaacttaagccccagtaaacggcggccgtaactataacggtcctaaggtagcgaaattccttgtcgggtaagttccgacccgcacgaatggcgtaatgatttgggcactgtctcaacagcaaatccggcgaaattgtagtgcaagtgaagatgcttgctacccgcgattggacggaaagaccccgtagagctttactgtatcttagcattgaatctcggtattgtctgtacagaataggtgggagacttggaagcagttccgtcagggattgtggagtcgtctttgggataccaccctgacagtactggggttctaaccggaggccatgaaactggtcacgggacatagctaggagggcagtttgactggggcggtcgcctcctaaaaagtaacggaggcgcccaaaggttccctcagcgcggttggaaaccgcgcgtagagtgcaaaggcagaagggagcctgactgcgacacaaacaagtggagcagagacgaaagtcgggcttagtgatccggtgacacctcgtgggagggtcatcgctcaacggataaaagctacctcggggataacaggctgatctcccccaagagtccacatcgacggggaggtttggcacctcgatgtcggctcgtcgcatcctggggctgaagtaggtcccaagggttgggctgttcgcccattaaagcggcacgcgagctgggttcagaacgtcgtgagacagttcggtccctatccgtcgcgggcgaaggaaatttgagaggagctgtccttagtacgagaggaccgggatggactgacctctggtgtaccagttgtcttaccaaaggcacggctgggtagctatgtcgggaagggataaacgctgaaggcatctaagcgtgaagcccacctcaagattagatttcccataacataagttagtaagacccctgtaagaacaacaggtgataggtcagaggtgtaagaatggtaacattttaagctgactgatactaataggtcgagggcttgaccaatataaaggtaaatatattaagattactatgcaattttgaaagtacaaatgctttcaaaaactaaataaattaatccggtgaccatagcttggttgtaacacccgttcccataccgaacacgaaggttaagaaccaaagcgccgatggtactgcaggggcagccctgtgggagagtaggtcattgccgggtaatggatctttagctcagttggttagagcaaccggctcataaccggtcggtccggggttcgagtccctgaaggtccaccatgggggattagctcagctgggagagcacctgccttgcacgcagggggtcaagagttcgaatctcttattctccaccataaaaaagatagcagataaaactgctatcttttttattttattcattatataattttaagtaaatataaagaggaggagatacattgattaaagggagaataaatcaattttttaaatatgtgtcttcgtatattagtgatgatgataaattatatattgaaaagagtttaaatacaaatgaaaaagaattattttataaactatctatccatgagcaaaaacattctataaatgttgcaagagatgttgagaagatatgtaatcaaaaagatataataaaagcggcgcttttacatgatataggtaaaatatatgtaaagcttaacttaatagataaatcaatattagttatattagattttataactaaaggaaaattaaaaaggttaagtaaattaaaaaaggttaattgctattataatcatggagatataggttattatatattaaaagatatagaaaatgaagaagtattatttctagtaaaaaatcatcataataatagtattaataataatttaaaacttaatatattaaaaaaatatgatgataaaaattaatttgagaactatatttttagtgtttatggtaaaattaaatatataaatatggagtaagatatggtgatataaaatgatttctgaagaaagaagagaaaatataaaaaacaaattagaaaataatgatgagcctattaagggaagtaccctagcaagagaattaggtgtgacaagacaagtgattgtaaaagatatagcaatacttagagcaaaaggacacaaaataattgcaacgcctaaaggatatataattaataaaaataattctaattctataaagagagttcttgcagtagtacatgagagaaatgcaatagaagatgaacttaattctgttattaagtttggaggagttgtagaagatgtaattatagaacatcctctttatggagaaataagaggaatacttatgattagaacactttttgatgtaaaaaactttatgaataaaattagagattatagtgcagaacctctttcaattcttacaggaggagttcaccttcatacaataagaactgataacgaagaggatatgaataatattgtagatgaattgactagaaagaactacataatatctgattagaaataaaaaatatgaggtgagttttttgaagaagaaagttactattgtaactataattttattcttattagttatagttggttcatttggtaaggtaacagactttataattaatttagaatggtttaaagaaataggatatacgtctgtgtattttacaaagcttgctgctatattaaaacttatgattcctatttttattattatatatactggactttggttttattataaaagtataaggaaaataattataaaatggaataaggttgttgaagttaatgtaaaaactgaaaaattaaaaaaaagagtagctattgtaattgatgttatagcatctttttttgtcgcatactttacgtcttcagtatattggtatagaatactacagtttactagtgggaatagttttaatatcaaggatcctatttttaatcttgatgtatcgttttatgtatttagattgccacttatagaatcattgtatggagtcatgctgttatttctaatatttatggctgtacttacagttattctctatatagtattaagtttaagagatagagtttataatagaaatattggtggtattaatattagtttcaaggaattttttaagggattaagtgactttgcaggtaggcagtttgctataatttcaggtttgataatgtttttggtagcagtaggttatgctataaggtcatttaatttagtttattctccacgtggtgttgtatatggtggaggatatacagacatacatgtatcacttgtattttacgtaattataattgcagcagctatagtatcatcagttgttatttttacaagcataatcaaatataaaattaagcctatatttgtatcaatagtagctatactaatattaattataggccaaagcataacggctgaaatagttcaaaatttaattgttaaatctaatgaaaagaatttagaagctccttatattaaaaataatatagaatatacaaggaaagcttttaatatagataagttatcagaaagtaattttccatcaagtgatagtttaacgcaagcagatatagatagtaatagagatacagtaaataatataaaagtaaattcggtaacacctgcactggagttttataatcaagtgcaagtggttaggtattactatgattttagagatttagatgttgataggtataatataggtggaaaatacagtgaagtatttttagcaccaagagaaatagatagtaaatcacttgaaggaaatgcagatacttggcaaaataggcatcttatatatacacatggatatggcttggttatgagtaaggttaattcagtaactagcgagggacaaccgaactttgtaataaaagatatacctcctcaaaatagcactaatcttaagattacaaatcctagaatatactatggtgaagaaacggatgattatgctattgcaaacaatactcttggagagtttgactatccagatggaagtaaaaataaaactaataattatgatgggaaaggtggaataaaggcaaatattttaaatagacttatatttgccataaataagagagattctaactttttactgtcagagaatataactagtaatagtaagattttaatcaatagaaatataatggatagattaaataaaatagctccatttttaagttatgataaagatccttatgtggttttaagcggtggcaagttattttggattgtagatgcatatacgacttctgatagatttccttattcccaaccatataacaatgttaattatataagaaattctgttaaagttgttatagatgcagtagatggcacaaccaacttttatattgtagataaaaatgaccctatagcaaacagctattctaagatttttcctggattatttaaagatgtaagtcaagttccaaaagatataagaagtcattttaaatacccagaagatttattttccactcagtgcaatgttttaggaaaatatcatgtaactgatacaggggttttttataatagtgaagatctttgggaaactgctaagaatcaaaaacaaataaatggcgaaaagggagtaaatgatgcttcgtactttataatgagacttccaggagagaataaatctgagatggttctaatggagtatttcaatatgaaagataaagataatatgtcagctatatttggagctaggatggatgggaacaactatggaaagttaattttatataagcttccaacagataaaacagtttatagcccatatttatttaagcaaaagttaaatcaagatccttcaatatcaaaagaagtttcactatggaatactcaaggatcaagtgttcaatttggagatacgtctataataccaataaaaaattctcttttatatgtagaaccagtttacttaagagcacaaggaaaaaatagtatgcctgaggtgaaaagggttattgtatcctttgggaataagatggttatggctaatagtatagatgaggcattgaatcaaatatttaataatagcagtaataatcaatctgaaactagaactgaaacaggaggaacatctactgatagttcaaataataaggataaattaaagcaggctcaggatttatataatcaggctgttgatgctcaaaagaatggcgattggtcaaaatatggtgattatataaataaactaggtaagactttagatgaattgaataaatagatttttaaattataggttatattttgtagcctataatttttttaatccatttatttgtttaaattatgcttttgtgtaaataataacaaataagtggaggaaaaaaatgattaagaaagaaatattaaaatttttattatcaagcttaattagttcaatagtagcatgttcaattatagtagcgcctatattctttactaaagatgataagccaggagattatgttccacctagtatttcatatgagaagaaagttaaagctgaagttaagcaagaaatgaagtataagtttaaagataatattgctgttttttcttcaattgattgtagtaaaaatacttattatataaataagaataatgtacagcttgtaactaacatagataaaggaacagctgatatatatacacttaataaaggagaagaggttgtagctacaaaagaaaagaatggatatatttattgtgaaacaaatcatgttgataataatggtatattcattaatggttggattaagaaaaatactgataatcttacaggtctaaaatatataaattcagatactttaatagatgttaatatcacatctcaaagtctaaatgtatatagaaacaatgtcattttaaataaagaacctattaaatgttcaacaggcattaaaggcgatgaatacaaagagacaccaatggggatttttacaattaaaaaaaaggtacaaaatttatcaaacaaaagagaaggggaaaacgcaatgtatggtatggaattttttggtgattattttataaattcagtttcctttaatgaaataaaaaaaggtggtaaaatagtatatgatgaaaatataagagaaaaaaataatctaggaaagtgcgatactaatggaggaataaggctttcaatagcagattctcagtatatatataatttagtaaccgataagagtatagtaagtattcactattaaagattataaaatctgtaaggggggattttatggattatgatgttttaattttaggtggaggtataataggttgctcgatagcttatgaattatctaaatatagtttaaatgtatctcttatagaaaaagaatatgaaattggtgatgatacttctatagtaaattcagacttagtgtatgatggaatagagtctaaatataattttaattatgggttagagactgaaggaaatcaggaaattgagaaaatttgttcggtgctttcagtaccatttaagaaggtgaatgctattgtgtgttcacgtgataaagaaaatgaggacacaataaataaaatatatagcagaggaataaaaagaggaataaaagatgcaagtttagcaaatattgagtcagcaatagctaagagtataatattaaaagacataaataataaaggtattgaactaaaagatattggaattgtatgtgctgatgatttggccttagcttatggagaagtagcctttgataatggtgttaattttagattaaatgaaaaggtaattgagataaagaaaatatctaaggggtttaatgtaactacaagtaaaaataagtttacatgtaaaatagttataaatactattcctgatgcaagtagccctattttagtagacggaaaagaagataaaggttctaaaaaaaatattagtaatttaatttattttgtattagatagaaaagttaaagctagtctaaaacatgctatagcagtcttaagtaataagggtgatagtacatatatatttagagattttgaagataatataatagtaaaaattgttacaaaggacgattgtctatatgacgaggcacttgataaactaaaagctgtaataggagatattgaagaagaggacattatttatttttacaaatcaagattcattaatgataaaatagttataacaaataaattagatagtgatggatatataaaagtacaatgtaagagttatgcaatatctacagttacaccatcaattagcagaaatgttggtgaagctatagtgaaaaatttaaattgtaaattgaaaaaagagttttatggtagaagacgtgaaatatatagatttagggatatgagcaataagcagagacaaaagctaatagctacgaatcctgattatggaaagataatttgcagatgtaatcaagttacagaaggagaaataattgattcaataagaagaccattaggagctaggacattgaatggtataaagagaagaactggagtattcaatggagaatgcctaggaacttgttgtattgataagatagttaagattttggcaaaagagactaataaaagtcttacggaagtaataaaaaagactgaaaatagcagtattgttaaaggaagaataaaagaatttgatgaaatgtaggtgaatacaatgtcgggtaagcaaatacttactacccttgtaagaataaagggttcatctggagaagttgttcctgtcaaaagtagagaaccaatagataaagaattatttatagaatgctctaaggctttaagtaggctatatgtgggcacacctataaaatgtggagatttgatatgtcaaaatatattgaatacaggtgtcgatataatagcaacaaaaaatataaataaaaaataaaaaagagtattgacaaaaattatttatgaatatataatgacattagttgaataattataaaccgttgaagagaatagtaactgtttaacaattttagagagtcagtggttggtgaaaactgatatttgttatttagtgaatccgcctcggagggattgcgatgagcaatacggcgattgtgtcgttaaatttcaattaagataatcattttaaatgattaattagggtggtaacgcggtctttcgtcccttacgtaaggggattgagaggctttttttattgtcaaaattaagaattttaaacttcagaagagtaactgataaggattttttttccgtaattatcatttgcttatttttataaccttttttcagaaaaataatacaaaaaagtaaatattttaatacatatacaaaataagggggcattcatatgcataaaaaattatttatacctggacctgtagaagtagcagaagatgtacttcaaaagatggcagagcctatgataggtcatagaagcaaggaggcttcgtcacttcaaaggggcataagtgacaagcttagaattgtttttcaaactaaagaagaaatattactttcaacaagttctggaagtggattaatggaaggagcaattagatgctgtacagctaaaagagcagcagtattttcaataggagccttcggtaaaagatggtatgaaatggccatagacaacagagtaccagctgatttgtatgaagttgaatggggagaagcaatcaagcctgaatttgtagatgaagttttaggaacaggaaaatatgatttaatagcattaacacataatgagacatcaacagggataatgaatccagttggtgagatagcaaaagttataaaaaaatatcctgaggtagtatggtgtctagacacagttagttctatggggggaactaatataccagtagacgagcttggagttgacgtttgtataacatcatctcagaaagcacttggactacctccaggattggcagcatgttcattctcaaagaaggcaatagaaagagctagaaatgttgagcacagaggatattatttagatctattaaaactatatgagttcattcaaaagaaagattatcaatatccatcaacaccttcattatcacatatgttcgcacttgattatgctcttaataaaatgcttgaagaaggcatggataacagatataaaaggcatattgaaatggctgagtatgtaagggcttgggctagaaaaaatttcgaaatatttggtgatgaagataacctttcgaatacggtgacaactataaagaacactaggggcataagtgttgctgatttgaataaggaacttggaaaaagaggatttgcaatatcaaatggatatggcaagttaaaggaaaagacatttagaattgctcatatggctgagtttactttggatgatattaaagagcttatagaaaatataaatgatattttaaagctatagaattataaaagggggcttttatataatgataagaatattagctaatgatggaatgaataaaaatgcagtaaatggattaatagatcttggttatgaagttgtagaggaccattatgataaagacgaattacttgtgaaaataaaagaatttgacgttttagttgtaaggtctgcaacaaaagtaacaaaagaggttattgatgcagcaacagttaaaggggcaaaacttaagcttattataagagctggagttggagtagataatattgatgttacgtacgcaagagataaggggcttacagtaaataatacacctaatgctagcagtgcttcagtagcagaactagccataggacatatgtttgcagtttcaagatttataaatactgcaaatgtaactatgaggcaaggtaagtgggaaaagaaagcatacacaggaactgaaatttttggaaaaacgttggggcttataggatttggaagaattgcaagagaggttgctaaaagagcagaagcactaggtatgaaagtaatctataatgatatatgcggcaaagtagttggttatgatagctatgagttttatgatgatataaatggacttttgagggaggctgattttgtatcacttcatataccgtatgataagaaaaagggatatgtaataggagataatgagtttaatgcaatgaaagatggggcatttcttataaactgtgctaggggtggagttgtttcagaacaagcgcttttaaatgcaattaataatggcaaaataagaggggcagcgcttgatgtgtttgaaaatgaaccaaaaccttgtgcagaaattttagataatcctagagtttcagttactccacatataggagcgtcaactaaggaagctcaagctagaataggtgaagaaatagtaaatatagtagagaacacgtttaaatagagacataaataaatgccgctgaagaatatataaacagcggcatttatagtacataaaagaagggaagagatttattatggcagtattaagagcttttaaagctataagaccaactgaaaatttagctagtaaggttgctgcacttccttatgatgttatgaatacggaagaagcaagagtaataggagaaaaaaatgagttgtcatttgttcatatagataaggcacaaatagatttagaaaaagatgtagatcaatacagtacagaggtttatgagaaggctaaagaaaacttatacagtatgattaaaaaaggtatatttgtaaaggataataagaaaaacctatatatatataggcaaataatgaatgggagaattcaaacagggatagttggatgcacatctatagatgactatattaatggagttataaaaaaacatgaatttactcttccaagtaaggagaaggatagaataaatcatgtagattattgtaactcaaatacaggacctatatttttaacttatagatccaacaatagaataaatgaaatagtagatgaagaaactaaaaagaaacctgtttatgattttataagtgatgatggcatatctcatatagtatggataataaatgatgatcaagcaataaaagaaatagagttattgtttggtgaaatagatgccctatatattgccgatggtcatcatagagcggcatcagcagtaaaggttgggctcaaaagaagagaagataatcctggatatacaggtgacgaagaatttaactttttcctttcagttgtatttcctgatacagatcttactataatggattacaatagggtagtaaaagatttaaatggaatgactgtagataaactagtcaataatataaaagataagtttgaaattgagaaagtaaaaaataaagaaccatataaacctaaaaagaagcatgaatttggaatgtatgttgaaggtaaatggtatagactaacagcaaaaaaaggaacctttaatgaattagatcctgtgttaagtcttgatgtttcaatacttcaaaataatcttttagaacccgtattaaatataaatgatcctagagaaaatgataggattgagtttataggaggaatcagagggcttgaggagcttgaaagaagagtaaatacggacatgaaaatagctttctcaatgtatcctactacaatacaggatttaatgggtgttgcagatagtaataaagtaatgcctcctaaatcaacttggtttgaacctaagcttagaagtggtctctttatacatgaacttaaataaaaataaatggaagtgaaatcttatgttagatttagatttaataagaaacgatactgaaaaagtaaaaaaagctcttttaaaaaagatagataatgttgattttacagagcttcttaaattagatgatgaaaggcgaaagcttattcatgaagttgaggttttaaaaaataaaaaaaatgaagcttcaaagcaaatttctaatatcaagagccaaggtggcaaggtagatgaatcgttttttaaagatataaaggaaatatccaataaaatatctgaattagaaacaagtttagagcctataaaggggaaaatggatactttcttagaagcattacctaatatacctgatgaagatgtacttccagggggaaaagaaaataataaggtagtgcatgtttatggtgaaaaaccacaatttgaatttgaacccaaggatcatgttgaactttcaaatatacatgatttgattgattataaaagaggaactaagttatcaggaaatggtttttggatttataaaggctatggagcaattttagagtgggcccttttaaactattttatagaagagcatattaaagacggatacgaatttattcttccgccccatatattaaactatgagtgtggaagaacagcaggacaatttcctaagtttaaagatgaagtttttaaagttggcagtaatggcgaaggtgaaggtatgcaatttattcttccaacagctgaaacagctttagttaatcttcatcgtgatgaaatactaaaggaagatgagttacctaaaaaatattttgcgtatactccatgttatagagttgaggcgggaagttatagagcttcagagagaggaatgataagaggtcatcagtttaacaaaatagaaatgtttcagtatactaagcctgaagattcagatgcagccttggaggaacttataggaaaagctgaaaagcttgtaaaaggattaggacttcattatagactatcaaaacttgcagcagcagattgcagtgcttcaatggcaaaaacctatgatattgaagtatggattccaagtatgaacgagtataaggaagtaagttctgcttcaaatgcacgagattatcaagcaagaagaggaaagataaggtttagaagagaagaaactaaaaaaattgagtatgtaaataccttaaatgcttcagggcttgcaacaagtagagtacttccagcaatacttgagcaaatgcaggataaggatggaagtatagttgttccagaagttttgagaaaatgggtaggaaaagataaattataactaaaaaataatgaagagaatgaagggttctcttcattattttttatatttaacccctaagaataaattcctatagctatgttaagaatagacttgaggagggttgaatatgaataatttaattgtttttgcacatccaaatccaaacagttttggaaagggtatattagatgaagttgtaaaagcatcagaagagagtggtgcagctgtaagaattagagatttatatcaattgggatttgatccaatattaaagcctgctgattttgaaacttttcaaagaggagaggttccacaggatattaaagatgaacaagaaaatgttaaatgggcaaacatgattacttttatttatcctgtatggtgggctggactaccagctatgcttaaaggatatgtagatagagtatattcatatggatttgcttatgagtatgttgatggtcagccaagaggtttattaacaggtaagaaggcattaatattctgtacaacaggaacaccaagtgatgtatatggagcaaatggtatgcataactcaatgaagcagacaacagatgaaggaatatttaagttctgtggaatagaggaagtaagacataacttttttggagcagttccgcatgtttcagatgaaattagaaaagattatttaagagcagcttcagaaatagtgaaggagcacataagttcttcaaaaagtttcgtttaaaaaatataaaatcataaggttggaaataatataaactttccaacccctattctagtccattatcatatttacaataacacgtgcacattcatctataagtatatttttatttaagtcgggatatatatcaaaaacaagttcatcttcaatattttcaataagagagtatatcaaaaaagactgttctttttcatgctttaaattaattccacatttctttaaatgcttaacaacagcatccatcatagtattttttatattttcaaaaaagcctcgtacatcttcatcaatataagatagagacataagctcatcatgatatttttttgggtaactagtgtgaaactttataaaaatttggagtacattttttatagtatttacgggattatcattttgggaaattttatctaattcattaagggtttgttctctaaaagacttactgctttcataaagagatgaaagtaaaatgtcctttttatctttaaaatatgcataaacagttccagtagaaagaccagctgcctttgctatgtctgctgttgttatatcataatatccgtttttcaataaaagagtatttgctgcatcaagtattctcttctttttttctatcgaacgtttttgttgaggttttcgaacttccttgtccaaattttttcaccttcttatatttaagtatattaagaatattttaatataaccataataggttgtcaatcaaacatgaaagtgatttcatatttgtattgacagtaataacccatcaggatataacgtgaatatgaaatgcgtttcatattttggaggtggataaaatgaatgaaagaaaaaaatacattggatttattggaatacttatagcagcttttcttggagttattgatagtacgattgtaaatattgctcttccaaatataacagattattttaaagtaagcttaaatgatacaagttggatcagcacaatttatgcattggcactagctgtttttatgatcacagcagccaagtttgcagatcaatttggaagaaaaaaattaatgattattgggattttaatctttggagtaagctcagccttgtgtggaatttcaaattcattattgtttctcattataatgagatttgtacaaggaataggaggggcaattattacgccaatagcacttccaatgggaatagaaatattcggcaaggaaagaatgaacatagttgttggtgcatctggagcagtggttggtttagcagctgctagtggacctccattaggtggagttttgataaagtatataaattggcagtcggttttttttgtaaatgttccatttgctatagcagctttaattcttattgttatttgtgtcaatgaatcctatgataatacggtttctaaagatatagactggtttggagtaatgactctaactataagtttattctgtcttatatttgcactattaaaaggaaaggattatggatggacatccacactaataatatctttgtttcttatctttgtagtttctctgattctattcattataattgaattaaaagtttcttctccaatgatagaaattaatttatttaaggaaccaacctttacagcatcaagtatatgttacatgataacggggtttggacttatgtgtcctcttcttatacttaattactatcttcaaaatgttcttcagtacgacacacttgaggcagcctttattatgatgagtgtatccctaacaggaatgttttcaacaccaattggaagtattttaggaaagaaagttagcccaagaattataaattttattggtatgttatcccttggaattggaatatttagactatcatatttgagttatggtatgtcaaagggaactatgatatttgatcttattatatgtggaataggacttggattttctgttcaagctctttcatcttcagttaaatttatccctaaagaaaagagtggtataggatctggaatagtaaatgcggctagacaaataggaagttgtatagggatagcaattttagttagtatgttaaattcaaatgtatctgatgcaaaagataatataaaaaaagatgttgtttcctatataaataataagaaagaaataatttatccagtaagaaaagaactagttaagatagtaaatgataagtttaataaaagtgataataatttatcaaataagagtactatgtcgcaaagttcaattacaaatgacgtaaaggaaatacttaaaagaaattcttcagttttttctaatagagcttcatttgaagataatgatacattagagcagctttataatgcaacgaagaagcttagtgatggaagtgaaaaatcatatcagggtcaagtagttttaaataatggaataggagctttagatagcggtattaacagtatctacaacgggagcagtgctttgacctctggtatgggtagccttaataatggtcttaatagagcatttttaggtagtcagaagcttaaagaaggaagtgcaggattaagtaccttagtaaatggtatttcacaacttaatgatggctcaaagaaattatcagcacaattttcgcatagccaagatgaaaatactcctacaatatatgatggtatttatggtgttaatgatggagcacaaaaactttctagtggagttactacttatgtttcttctgtagatagtaccatttatatgatggctaaaaatacaccaaatgcggctaatgtacttgaaagttataaagcagagcttattaaggctaaagcgaaaaatgacattcaaagcgaagagatgcttcaaaacttaattgccatttattcagcagcaattgattctagtacaacaaatttagcggattttaaaaatagattaaatgaaaataaaaacattgtttcgtcaggagaggaagtaaaacaaggagcagaaaaagtttcaggaggaacttcaaaggttttaggtcaatttgaagatggaggaagttttaaaactggagttttagcactatcagaaggaattggcaaaatgtctaattcttcatcaggcttaataaagtttcaggatggtataggaagtttaagtgatgctctttataaattaagtcggggaggctctaaagtatatgatggttcagaaaagctgtctagtggaataaaagcttctttagctggaggggataagttaaaggagggttcaggaaaaattttagaggcatcatctaaattaaagagtggaacaaacaagatagtagaaagtgaaggtatggcaggacaaaaagaatcactttctaaggttataaataaaataaaggatgaaaaaaatgataagatatctgaagcatttaataaaacaaatttaattgcagctattgttttgatgatatgttctttgttaggattatttactgacaaaagggagaaaaaggttgaagcataattatgcaaagaatacattaaaatacgctaaatatgataaagctaaaaatgcactaaattaatatatttctgcacaattttcatgtatagacccaatatttgaaattttatagtattcgtgataaactacattatgtatgcttataattatgtaagtatttattgataagggtaaaataatatgtttatataaattcttattattgggaggaggaactattgattaggttcaatagaaattaatatgttagatttaaaaagaataagaactaatccagaagaaataaaaaaggcactaacaaacagaggagaagatttcgatatttctgtcatagatgagcttgtatctcttgacgaagaaagaagaaaaaatcttgtagaggtagaaaatttaaaaagtaaaagaaataaagattctggcgagatagctaagcttaaaaagtcaggacaaaatgcggatgaattacttgctgaaatgaagaagatttcagatgatataaaaggaatagatgctaaggtatcagaaatagatgaaaaaatgcagtacataatgcttagaatacctaatataccacatcctagcgttccagaaggtaagtcagatgaggaaaatgtagaaataagaaaatggggagagcctagaaaattcgactttgagtttaaagcacactgggatataggaacagatttagggcttcttgattttgaaagaggaggaaaagtcgcaggttctagatttacattctataagggacttggtgcaagacttgaaagagcagttataaactatttccttgatactcatgtagaaaaacacggatatactgaaatcctcccaccatacatggttaatagagttagtatgactggtactggacagttgcctaaatttgaagaggatgcttttaaagtagataatggattctttttaattcctacagctgaagttcctgttactaatatgttcagagacgaaatattaaaagcagaagatttaccatataagtttgctgcatacagtgcatgctttagatcagaagcaggctcagcaggaagagatacaagaggacttgttcgtcagcatcaatttaataaggtagagcttgttaagtttgccaaaccagaagaatcttatgatgaacttgaaaaattaactcatgatgcagaggaaattttacaaatattaaatattccttatagagtggttagaatatgtaagggagatttaggctttacagcagctttaaagtacgatatagaagtatggatgcctagctacggaagatatgttgaaatttcaagctgtagtaacttcgaggatttccaagcaagacgtgcaaacattaaatttagaagagatccaaaggctaaacctgaatttgttcacactcttaatggatcaggtcttgctgttggaagaacagttgcagcaatactagaaaattatcaaaatgaagatggaagtgtaaatgttccagaagcgttaaagaaatatataggaaaagacgttataagataaataatttaaggtgacacaatgtagtgtgtcacctattttatattatatgaatttaaggattaacagagttatttagaggttaaatatccttgagtttttaagagctcagcacttaaaacaccgccaccagctgctccacgaagagtattatgagataagcatacaaacttatattgaaataatttatcctcacgaagtcttcccatagttattcccataccattttcaaaatctctgtctagttttgtttgtggtctatcaggttcatcaaaataatgtaggaatttttttggagcacttggcaaatttaaagcacattcaggggctttaaaattttcccaagcatctattatttcctgttttgaaggtttcgttttgaaattaacaaatacagcagccaaatgaccatccgttacaggaactcttatacattgagtagttataagaggagaggaagcatttacaattttattattctctatttttccccatatttttagaggttcattttcacttttctcttcttcacctttaatgtaaggtataacattatcaagtatttcaggacattctttaaaggtttttcctgctccagaaatagcttggtaggtacaggcaagaattgtttctggttcatattttaaaagagcacttataggaggaacatagctttgtatagaacagttaggtttaacacttataaatcctcttttagttcctaatctctttttttgaatatctattatttctgtatgattgttatttatttcaggaattaagacaggcacatcttgtacgtatctgtttgcagagttattagatataacaggcatttcatgttttgcatagtcctcttcaagaagtctagtttcttctttatttaaggaaatggcgcaaaaaacgaaatcaaccatgcttgaaatttcatctacatcaaacgcatctttaactataagatttttaactccttcaggaattggctcattcattttccatctatcttttacagcttcctcataggtaagaccagctgattttttacttgcagcaattagtgtaacctcgaaccaaggatgatcttttaaaagacatgcaaatctttgtccaaccatgcctgttccaccaattaatccaacccttaatttattcataggaatcacctcaaatttatttgattgtttataatatatatgctaacatacatgtatatattagtaaaattgataaatttgattaatatattcaaaaaaattgataggagaagaggttatggattttaagcagttaaatacatttatagctgtaagtaagtatcaaagctttacggaagcagcccattcgcttaattacgcacaatctactgttactactcaaataaaaatattagaagaagaacttcaaataaagctttttgaaagaataggaaaaaaagttaccttaacatatgaaggaaaaaagttattgccatatgctaaacaaatgattaaactgtcaaatgaaataaaaaaagtagttttagatgatgaaaagccaagtggaacacttacaataggtgctgctgaatctttatgcgttataaggcttccagagatacttaaagaatatagaagattatatccagatgtagaggtgtctttaaagttcggaagttgcgctgattttagacattttttgaaggataatataatagatgtagcattttctctaggaactaagattgattcaaatgaatttatatctgaggttgaatttgatgaacctatgattcttttggcatatccagatcatccgcttgtaaaaaaagaaaaaatatatccagaagatatagtggaagaacctcttgtgttaacagaaatgggatgcagttatagagctgcatttgaaaatattttaagaagttataatataaaacctaaacttgttcttgaaacaggaagtgttcaggctataaaacaatttaccatgagtagattgggaataacacttcttcctaaggttgctgtagaagaagaaataaagaatggaaagttaattccacttaactggtgtggaccagatttcggtattatatcacaggtattgtatcataaggacaagtggatttcgccggcattaaatgcctttcttaaattatctaaaaaaattatgtcagataaagataaatattaaataaaaacgttgacattaaaaagagtggatgttataataaatcttgtcgtaagaaataggataaaattttaaaataaattttattttattgttgacaaacaaaaaaatatgtgatataatattttatgttgttatgtggaaagatggtcgagttggtttaaggcaccggtcttgaaaaccggcgtgcgggtaaccgcacctagggttcgaatccctatctttccgccattaatttaatagaagaaattcgtagagcatatggagaagtactcaagtggttgaagaggtgcccttgctaagggtataggtcgggtaaccggcgcgagagttcgaaactctccttctccgccataaaaggacattgtaaaatgtccttttatttgtttttaatataattttattcaagtaaggagttgataactctttatgaacaaaagagtcgtaaaagtagaatatatttttatggcatttgcattgttctttggtgtgctatttgcagtaataaatgctccatttcaggatccagatgaaccaatacatttctatagggcgtatcaaatatcaacaggtcaaatgtttgaacaaaagaataatagcggcataggcggatacttaccgcagaatctaataaaaacgtcagaaaatttatctgaagacataaaggctaaatccaataaaaaacaagatattaataaaattaaatattatcttaatttacctttgaataaaaataaggtggcttttaatgattttagaagtgccactatatattcagatatagtatacataccacaaagtataggcattaatttagctaagatttttagagcttcggcactttatatgatgtattttgggagaatagctaacttaatatgttggacaataatagtgtttttttcagtaaaattgataccttttaagaaaaatttaatggcttttttagctttaactccaatgaatttgtatcaagcagcatcattatcagcggatgctatgacaaactctatggcttttttaagtatagcgcttgtacttagatatgcatttggggaagaggaagctaaactaactaaaaggcagattgttacaatgataatagcatttacattactagcttttagtaaaagaatttactttgtaatgtgtatcttattcttcataattccaataaaaaagtttaatagtaaaaaggattatataggaacatttgtaataatgctaggtgcatgcttaatgtctttagtaactgtttcggtaatatctaaaattttagctataaaggtttctgccgggtcgtacactccgggacaaatggaatttgttctttcacatcctattacatatatacatatattacttagaacatttcattttaaaatgtctttctacgccattagttttataggagtttttggatggttagatacaaggttacctttaaatttgtatcttttttatggagtggcattagtattaattgcattattcgaacatactttaattgaaaagaataaggatagaattattatgtttatagtattcataattaatgtaggattgattatgtcagctctttatgtatcttggacacctaaggctgctaatattattgagggaatacaaggcagatattttatacctataatacctctcttaggttgttttattggagtaaaagcgaataagagtagaaatgtatattctaaggttgttttagcaatttctacatttactatattaacatactctgtattacagttattattaagattttacggtataaggatattgtaagaagaaataagggtaaaatataggatttgatttttttgttctaatgtgataatataagtatgcttaatattttgcgatagtacctcaactggatagaggactcggctacgaaccgaggcgctgcgggttcgactcctgcctgtcgcaccaataaaacccaatcttttgattgggtttttatttttgtgtaaataattaatattttaaggtatagttgcttctatttttcagaagtatatatgatataattataaaggaaattaatcagtaaaagtaaaggagtaggaaaatgattctttcgggaaaacagataaaagatagtttaggaaaagatatagtaatagaaccctttaatgaaaaacaaataaatcctaatagctataatttaaaattacataatgaacttcttgtttatgatgaagaagttttggatatgaaaaaacctaataaaacaaaaaagcttataattcctgaagaaggaattgtacttgagccaagaaaattgtatcttggaagaacattggagtatacagaaactgataaatatgtaccaatgctcgaaggaagatcttctattggaagattgggtgtgtttattcatgttacagcagggtttggagacgttggatttaaaggatactggacattagagatattctgcgttgaaccaataagaatatattctggagttgaaatttgccaaatatattatcatgacgttggtggagattatgaaaaatattcaagtggcaaatatcaaaataataaggggattcaaccaagtttactttataaggattttataaactaaaaaacaaataaggtgatgtatttgaataataaattggttagatcattaaagtataatgatgtctacggagaactttattcttatgaaaattcaagtgctctaactgtaatttttccaggaataaattatggtcatgaaaagcctcttctgtattatgcaaggaaagcagctgcacagaataatatagatattctatgcatcaactataagaataagatttcttgggaggacataggaaaacaaagtattgaagatgtagctattgaaataaagggcattataaaaaatgttattgaaaaaaagtatgataacatttattttttagggaaaagtgttggaacagaaatagctggatgtacatcttctaaattaaatatagataatataaagtttctttacttaacacctattgaagagactttaaagtatatagttgacagaaagtgcattgtggtgtcaggcactaaggatgaattttttaaaagtgaatgtataaataaaatcagagaaaataaaaatgttaaattgatgttgtttgagggagctaatcattctcttgagattaaggatgatattataagaagtttaagaattttagataacgtagcacaattgtatttggacttctttaaataaaaacatggagggctaaaaatggaacaatacaaacaagaatttatagaatttatggtggagagtaatgtacttacctttggggatttcataactaaaagcggcagaagaacaccattttttataaatacaggtaactacaagacaggtaatcaattaaataagttggctaagttttatgctaaagcaatatatgataattttggagatgattttgatattttatttgggcctgcatataaaggaatacctttaagtgtttcagtagctatggcacttgataatatttatggaattaatgcagcttattgttcaaatagaaaagaagttaaagatcacggtgataagggaatacttcttggagcaaagcttgaagaaggagacagagttataattgtagaagatgtcacaacagctggtacatcagtatacgaaacaatgcctatacttaaatcacaggctgaggttgatgtaaagggaatcataatatcagtggatagaatggaaagaggtaagggagataagagtgccttaactgaacttaaagaaaagtttggatttaaaacatgttctattgttactatggaagaggtagtagaatatttgtataagaaaaatatcaatggcaaagtaatcatagatgataaaatgaaagatagaattaatgagtactataaagagtatggagtaaaatagtaaaataaatgtgcctcaacttagatgttaaggcacatttattttatatattattcatgttttgaaacatttttatcttttgtgtattttacgtgtagtaatttgtgagcaagtccttcacctggttttccaaagtagctatcatacattttaataatagctggattatcatgtgactttctctttgaaagaacatttttatcttggttgtataatactgatgctcttagttttctgtaatcaacattttctctatcaagagcatttacgtgaggttgacctccaccatttatacatccaccagggcaagccattacttctataaagtgatattgtttttcgttcatttttccagatttcataaactcgaagaagttagaagcaccatttataacagcaacgtttagtttatttccagcaatttcaacttccgcttcttttatgcctttaaagcctcttacttcagtgtaatcaacattttcaagttctttattttcagcaaagtctttagctgatcttattgcagcttccataacgccaccggttgcaccaaagatagctccagcaccactgtaagtacccatagcaggatcaacttcaccatcttcaagatctgcaaatttaatttttgcatctttaatcatttttgcaagctctcttgtagttaaggatgcatcaatatctcttaagctgttagtttccatgaaaggaatatctgcttcatattttttatcattacaaggcatgatagtaactgtataaacatcttctggagctattcctgaaattgaaggatagtaagtttttgatgcagtaccaaatatttgttgtggtgattttgctgatgaaagattatctaataattcaggatgataattttgagctaatcttacccatgcaggacagcaagatgtaaacatagggaatgggccattatttttaactctgcctaaaagttcagtagcttcttccattatagtcatatctgcaccaaagtttatatcaaatactttatcaaagcctaacattctaagtgcagtatatagttttcctgttacatcttttccatatcccattttgaataattcgcccatagcagttcttactgatggagccattgcaacaatgacatgttttttagggtcattaagagcttcttgaactttttctatatgggatttttcttttaaagcagcaacaggacaagcgattacacactgaccgcataataagcatgttgagtcatcaagacaaacatcatcaacagttccaacagccctttgtccatcttttttaataaattgaattgagcaagtgcttgtgtgctgtttacatgcagctacgcatctaccgcatagtacacattttgatctgtcaattacaatagccttacttctattatcaactagagcatccttatcttctggtaaaaatggttttgaagcttttgcttttgtctttattacaagtttaaggaattcacaattttctcttctagaacattgtccacatttaaattcatgcttatcaagaagcattgaaactctttttttgattcgttcttttacttcatcggattctgtgtttattaccattccatcttcaactttggcaacacaagcagctctaaagcccttgccttctacctctaccatacagactccgcattttccaaaattgccacaatcctttaaaaagcagagtgttgggatatctacattattttctcttgctagctcaaggatagtaatatctttatctgtatgcacttcattgccatttaagattattgttttcatgtttatcctcccaaaatgtaaaatataattaaaatatattaataaacttcgttaaaaaattaacgtttaatcaacgtaaatattacgtacattttataattatatcatatttaaataaagtctaaaatgttttaaataatttattttgttaaaagaagcacaaatcggttacatttaagtaaaattattgaattagtataatatggttggtataattaaattaaaaaatagggaggtgcaatatggtaaatattaagaaaaacacagctctagtagcagcatttataataactgctactacattaacaaatgttaaagcttatgcagtaactaatggaatgacaggaaatgagagaaatgtattaaagcaatatcaaagtaatattgataatacatataattcttttggagataagaaaaagacaaaagttgttaatgattataaaaataaggttaaaaaagctcaaagatttataagcagggatacagacgaaaattatggagattatccaactagaagtggagtaatattggtcactagagatagtaatactatgggaatacattatggacatgcaggtataatatgggatgcatcaactacagtagaatcagagcctagtggagttgaaagatatcctaacacctggaagtctagatataacacaataaagggaattaccgttaactcaactacagcagaacaggacaaagaagcagcagattggtgcaataatcaagtaggaaagccatacaattggaacttctttaatattaatacaagagataaattttattgttctcaattggtttgggctgcatacaaagacttatatggaatggatatagatcctaaaaaaacaataccttcagtgataattccagttgacttaccaaaacagaatacggtagatactatttatgcacaatggcaagctaattaaatcaatactaataagtttatttgttatatttatagttggctgtggtaaggcatctggtggaaatgaacaaggtaataaaaacagtggaaaagcggaaattgctgttattgaatcctctacatttaataacaatagctatataaaactttatacgctaaaaggagaagaagtacaggaaattaagattaattgtgtggatgtaaattctggatttctttcaccagtgaagcataatgataaagtttatacaaattccatagggggatactctaacaggagtaagaaggtagtagaatttaatgcgaaaaacaataagtataatacgtatgatatagctgagggaatattctccgttgctgtagatgatagctatatatatacaactaatagtcctcctaaaggatcaataataactaaatataatatagaaaaaaaatcaatcgagaagactttaaatttaccaggtttaattgaacacatagctttgtatggaaattatatatattcttttgctgattcagatgagagagatggaactataataataagtataatcaataaagataccttaaatattgaaaaatcaatgagaatgaaatcagaccaatctgtatttgatagcactatttatggagataatatatatttttcacatatgacgtcacaggatggaaacaagccttccaatactatttcaaggcttaacataaaagataatactgtaagcgatataaagataggtgcagattatcaagaccatttaaaagtatacaatgggaacttatatataagtcattataatcctgtagagaattcaggaaataagcttacagagatgaatcttgctacgggagaacaaaaattgcattcatttcagcataatttaatggaaattgaagtccaggataataagctttatacctgcgatgataaaaatatgtatatatacaatttaggtgaatttaaagagaaaagcagatttaaaattatggataatagaaaagactatagaattgacggcttttttcttatgaaatagtataaaaagtgtgctgcttaagcacactttttatacattacattattaatgtagggattatttttttccaatactttcacccataaatactttagtttcgtaacctaatcttgtttgctcaagtatatcttcatctattttaactgaatctttttcaaagaataaaactactgtggagcctccaaatttaaagtagcctttttcatcacctttgttgaccttggtattttccttgtaagtttgaataatacttccaacgcaagtagctccaacttctatatataggatatccttaaaattatcagactttaatatactccattctcttttgttttcgcaaaataacctctttactttatttaaggcaataggattcactgagtaatatgagcctttaatttttgaggtagcgctgcacacaccgctatctacaaaatgaaacctatgataatcagttggacatagccttagaatcatacatattccattcttatattttgagcttattttttcatcctttataagttcctttaggctatagcccataccttttatttcaactaaattatctaaatctatattctcataaacaagtagtctaccatctccaggagaaattaaaatttctttatttgtggagaaaggtcttgcttcttttgtaagttttctagtaaagaaatcattgaaggatttgaaagcttcaggctttttttcactttctagaatgtcaatatcaaaggagtctatgaatttttttactttgcctttactgatttttgaatcacaaaatgaaccatatatacttgaaaatgccttcttctttatcaaagcttccagaaagctcattccaataggagaggagtaagtccagttaaggtaattttcccctgctaccttctcaatttcatactgctttgtttttctattataatatttaatcattttcaacctctttataatttaattacttagattttgttataattataagctttggacttagttgatgtcaaaaaataattacttgatgaagttattttatgatactataattattattagggaaatatgaaataaagttaaaatttggagtgatcaaatgaataagacaaagaatgccatattcaagtctgcccttatgatattttcaaagaatggatatgatggtgcaactatggatgagattgcatcgaatgcaaaagtagcaaagggaactctttattaccattttaaaagtaaggaagaaatttttaaatatgtaatttctgaaggcatgaatgttataagagaagaaatggaacaggaagcaggaaaggaaagtaatcctgtaaataagttaaaagcaatctgtaggtttcaaataggaatgatatttagaaatagagacttttttaaggtacttatgagccagctttggggtcaggattccagacagcttgaattaaggaaagttataaaggactatatagagattattgaaagatatcttaaagacgcaatggaaaaaggctacataaaaaaaggagaaactgagtttatgtcctatactttttttggtgtactttgttctggagcggtgtatgacttaataaatcaaggaaacgaaagtatggagaatcttacaaataagataactagatatctttttaatggaatagatatattataaagtactaaaagacctcacttttatcattgtgaggtcttacattttatgtgaacgtattatagagataagtagccaaaaacccataagtgcagtaaggatatatcctgtaattcctattatagaaatattacataccttaggacctatatttgagtgaactataacagaggagcttattatcattgaggatattattatacctaatataagtctgttaaccattttacttaattcatttatagattcctctagatttgtgtggctaagttgaagtttagcacggcccctcatgatactgtcacttaaatctataaacttttttggaacctttaatgatgatttgaaaaacatatatgagttaagtaaaacttcatacatgttaaaattgccaaagatctctgctttgttttgagctttaacaaagggaattgcaacatctaagaaagaaatatcaggcgaaattttagcaataacaccttcaattattacaaagcctcttacaagaatgattaaatccttaggcattctaacattatttctctttgaacagtcaaatacttcttgaattagctgagatatttttatgttttcaagagaagttgataaatagcttgcaaaaatatagtctatatcttcatagagttgatttctatcaatatagccggtttttattccaatagacattattacagatattaatttatctatattttgataagctattgatataataatatcgtttaatgcgtttttaagatttttactaatatgccccatgattccgaagtctatgtagcatattttatttttttgtattagtatgtttccaggatgaggatcaccatgaaagaaaccgtcttcaaaaacctgtttaaagtatgaaagagctaattttttgccaatatcatctatatcatgtcctgcctctttaagcgcttttacatcagttacctttaaaccatctattttatccatagttattatgtgtcggcttgatagcttgctaactaagtctgggcatgtaacaaaatccgtatctgagtttaattttttaaaaagaaccatgttgttagcttcatttttaaagtccagttcgagttctgtagaggaaatcaattcttcaatagcttctttagaatctattaaggtatctaaaaattttgcctttgttaagcttactattttatataggatagaaagatctaatttcatcttttcttctatattaggcctttgaatctttacaattacttttttgccgctctttaaagtggcttcatgaacttgagcaattgaagctgatgctagaggctttttattaaagtaggaaaaaaaatcatcaataggtcttttaaattcttctatgaatattctttccatattctcgaaggtttccgcaggggctttatcttgaagctttgaaagctcatgtatgtaatcaggaggaattatatcaggtcttgtgcttaaaatttgacctattttaataaaggttgggccaagagcttcaaaagctcttctcaagttttcaggagaattttttgcattattaagcttggagtcaactatgtagccaaaaccataaaaggcaagaactttaactatttttctaaaacgctgcactgactttttcatctttaaacctctctttaaaaacagtatctaaaagctctaacttataactataaactatgtgtagggaaaccagttaaaatgccttgcagattttaaaattggtgaaagcttcagcatggtttccctttaattaaagtgttttatttcaactaagttactgtattttatcttctagttttgaaactctttcctttaattcagttatttcagcatttaaaactgcagtatatttatctaaaacatctgaaatatcctgctttgatacaggctttactttttcacctacgagttcacttttttcttttatactcttttttaattcttgagaaagttcttttccttcttcaagagttagtttaccctttttaaccatctcatcaattaattttgaacctttttcataagtataggcagctgagcctaatcctgcaagaagaactttctttaattcatcaatcattgtaagcatcccctttacatatttatactatcataatagcaaaatacagtaactttgtaaatgaaaagcacttgaattatcagaatatataaaatattacaaagaaactatttagggatgaaattatatagtatattatatgtatttgttaaaaataatacatgcaatataaaaaaataaacacaaaatagagggatagacatattgacatgaagaggttttagtaataaaatattaacttgtaatggaaaatttaatatgtgctcgtagctcagtaggatagagcagcggtttcctaaaccgcgtgccgtaggttcgattcctatcgggcacaccaaaaagaccttgtaatatgaaagtattgcaaggtctttttgctttctctaaaacgatttgaaattaagggacaagcaaaaaagctacattaatatatagagtagattataagataaaaaatagcttgattatatatacaataaaaaatttaaaatattattgagtaaaatttaaaaaggagttataaatataagaaaaaacgtaattgaaggtggatatttgaaaaaaataatggtattatgtgtatgttattatatattttaaattaataagcaactaattgttattataaaaattgtacaagtatagtaacaaaattgaaaaggagtatatatggaaattgtagtaggtgctgtaagtgataaaggaaatataaagccaactaatcaggacaactttttagtgaaaatttatgaagacaacaatcgagatattggattgtttgttatgtgtgacggaatgggagggctttcctttggagaaatagcaagttctatttcagttaaatactttaaagagtggtttgacaaacactatgaaagaatcataaatgaaaaggatgaaaaaaaaataacagaatttatggccaaaatcatagaagttgttaatacgaaaattagagattatggcaaaaaagaatcagtgaaggttggtacaactgtatcggctttattactatgtaatgatatatactatattgctcatgttggagacagcagaatatataaaataaacaaggaaataaagcagcttacagaagatcatacactggtagctatgaatgttagaaataatattatgacagaaattgaagcaaaaaatagtgctaaaaagaatatacttacacaatgtgttggagttaaagaaaacattgaagtatttaaagaacgtggaaaaataaataaaaatgatgtttttgttttgtgctgtgatggcttttacaacaaatttgaagaagaagaattatatagtgaaataaaaaagattaaaaacattattgataatgatgtgcttcaagaagcagcgcagaaatttgtaaacaaggttaaggaaaggggagaaaaagataacatatccataataattgttggatttgtatctgatgaaggctttatagataaattaaagaagcatgttggattttaaatctaaataataaaggagcaggaaagaatgaataaaagtaatttaaagttggagtttgaaaataatccttcaaaaaattatatagtaacttatttagataatattgattgcattgtagattatgaagttgaaatgataaataataatcctacttctggagctttgaatattgaaataagacaatttaatgataaaatcaaagttttatatgatgcaacaggaagaataccgataaaagaatatttaaagggaagaactataaggaaaagtgaatttataacaatactaaaaaatatagcagtatgccttttggaatgcaaaaattattttctagatgagaaaaagtttcttatggatttagaaacaatatttataagtgaaaaagatttcagcgtgaacttattatatcttccatttgagctaattaccgaagaagatataaatgtaacatatagaaatcttgttaaaagtttaatcatagattttgtaagtattgaggaaaaaacttctgaaaacatcatacaagaaactttaaaatatcttagaaaagatgattttaatttggtaggctttaaaaattatcttgaaagttctgaaacatctggtattaaagtagtagatgcccctgaaagtaatattcaaaataaagtagaaagtgtacctgtgagaattgaaaatgaacctatacaagaagaagttgttaaggaaccagttgtgcatcatgaaataaagccttctaatatagatgttactcaaaataaaagtgaagaatttaacacagatagcaaccttaaaagtaagaaggtggaagtaaaaagcaatacaactggtaataagaaaagaaagatattatatatagttatttctcaagttatagcagcagcaataataggtattgaggttgcatttatacttaaaatgctgtttatgattatagctatagcagtagtagttgctgtagatgtagctcttgtaatatttattttgttaagaggaaataaagttgaaacggtagctgataaaagaagagcaaatactagttttataaaacgcgataaggaagctaaggaaagtaaaccatctaaaagagaaatagtaacggaaatgtcttatgaaacagaacttttagattcaaaaacagcctttctaatgagtaaaaaagctggtacagtagaaagaatattcataaataaggactcatttaaaataggtagaatatccggacaagcagattatatttcagataataaagctgttggaaaacttcacgcggaaataagaaaacaaaatgaaaaatactacttaatagatttaacatcaagaaatggaacctttgtaaatggccaaaaaataaatagtgatgaattatatgaaattaggaatggagatacaattatgtttgctaatagtgagtttacatttgctattgaataaaaagttatggtttatgatatggagggtagatttatggcaaagataaatttgattatagcagaaacggatggagcttatttaaagggattagtaaattatataagtagtaattttgaggatacttttagaatcacctgttttactaatagagaatatttggagaagtatataagctctggtaggatttcggacatacttttgataaagacagacatgttctatgaagggcttatgaaaaattctataaaatccattgctattttatcagaaggtggcaatatggatgaatttaacgggctccctgtagtaaagaagtatcagccaggggaaaagctttgcagagaaatattgaatatatattataataacaatccagaggtggccccttgtaaagaagtaaaaaagcaggaaggcagcataataacgctatattcacctgttggaggaataggaaaatcaactatagctatagaaatggctaaaaaactaagtgattctaacaaaaaagtactgtatttgaatttagaagatttacaatcaaccttggttttttttgaatgtagtacaagtaaaaatatgtctgatttcctttacttcataaaagaaagagatgaaaattttaaagaagttcttaaagatatagtacttaaagatgaggaaagtggaattaattactttgcaccagtagatagtgttcttgatatagaggatttaaaagtggatgatgttaagtttatgcttcaaaagctaatagaggtaaatatgtataactacataataattgatctaagttctacttttaatataaactacaaaacaatttttgagatgtcttctaagattatagttccaattggacaagataagctttcaagtgtaaaattacaaaattttctaaagcagctggataatttagaaaatttctcttttatacaaaacaaatataaagataatttagaaacaataataccgcatgttttgttaagggaaaaaaaacctattattcagaaaatatattatgatgaagcactagagagtgtaagcagtttaatatatttaaagaatagggcaagtacctttttgagatgtatagatgaactaattatgaaattattataagtatgtaggaggtaggctttggagaaagcagtagttatagttaaaattgaaggaactgaagaggaatatgaacttgaaatacctattgatattactgtaaaagaaatatgtgcagcattaaataaagcactaaaatttgaagatagggacataaaggtttcaggatattatataaaaacggaaaatcctataggctttttaaagggaaatgatgttttaaaaaagtacggaatagcaaatggaagcacaataatattgatataaattaaatcgtagcttataagaggtaaaaaaacgaggtggttaagtggaagaaaaaagaaattataataatgtccttatactttataattctgatttttataaagaaatagatttagatgactatgaaaaaggcacagtagttgttggtaatagtgcaaattgtgatattaagctgaagctagaaacagaagaattggtttatatttacttcaataaaataaatacctcttggcagattaaagatggagaaaatgcatactgcatagtaaatgatattaaaaccccgagaaagattttagttaatggagatcaaataactataaaaaatgtaaaggataaagaagagttatttaaaatcaacttttttatagactttatagtagaaaaagaaaactatgataaggtaatctccttaaaggatgtaacttatttaagtattggaagagatgaggataacaatatttcaatacgtgatgatttaatagatagaaagcattgtgaaataaagtgtgattccaataataaattttatgttacggatcttaaatctaaatacggtgtatacatagacggaaaaaaagtagaggataaagtttatttaaaagataataattttattacaatttgtggacataagattttatttatggataattccttagcactttcaaacttaaatgaaaacatagttataaatggtgctactgtgtataacaaggataggtttgataaatatatgagctatcctgatttttataggtctccaagatttttagtagaacttccaagagatgaaatagaaattgatgctccaccagataagccgagtaaggtatccatacaatatttactatctgtaatacctattgttggtactgtagttatgatgtcactaatgtcatccagcatgggaagtaacaagacttatatgatatattctgttggaatggtatcactttcggcgttagtaagcgtaataacctttgtaacagagtttgttagttctaaaaaatataagaaaaaaagaaacaagttttatagaggctatattgctgaaaaggaaaaagagattacagacaacatagaacttcaaaagaagaacttgaaaatcatgaatcctgaaattaatgaatgttttgattttgttagggaatttgatagaaggctttgggagaagaagccaagccatccggattttttaaatgtaatgcttgggcatggagatacttccatatcattctctgttaaaattccagataataaaaacaaaatggaaatagacgaccttgaaagacttgcaccagaattaaagaagaaatatcaaaaagttgaagatgtaccattaagtttaaatctcttaaaatctagccccataggtgtagttggtaagaaacagcatacatataagtttatatctaatttaatggtaaagttaacagcaggtcatttttatgaagatgtaaaaatagcaataatagtttcaaatgaagataaggaaagcttaagttgggtaagatgggtacctcatatatggagtaggaaaaaagagataagatttattggaagtgacaaagagtcttcacataatgtacttaattatctttatgatgttgcaagagaacgtagtgatgataatgaaaatagtcatgaaccaaaagtaaatttacctcactttatagtttttattgcagataataagttgacagaaaatgagcctattatgccttacttagagaatagaaataacgtaaatatgacagcagtgtttgtaagtgaaagtatagagatgcttccaaaagaatgtacagatgttatagaggtttcagctggatacaatggaagttctactgaaactataaatagagcacattttatgcaatttgcatttgatgatgtaaatttaagagaatgctatgaatactctaagaggatggctcctatcaatgtaaagagctctttctctgaaagttccctaaaaagtttaattacgttgtttgatttatacaatgtaaaaagaacacaggactttaatgtactttcaaattggggaaaaaataaggtttatgaaacaatggaagttccaataggtgtgaaagccggagatgaaatagagtacttaaatcttcatgaaaagtatcatggaccacatggtttggttgcaggtacaacgggatctggtaaaagtgaaatactacaaacctatattatttccttggcaataaattaccatccatatgatgtagcactaataataattgactataagggtggaggtatggctaatttatttaaaaaccttcctcacttagttggaacaattacaaaccttgatggaaatcaaataaatagatcacttgtatcaataaagagtgagttaaaaagaagacaaagaatttttgcaaagtgcaatgtcaatcacattgatgcatatataaagctttataaagagaagaaggtaacagaaccgataccgcatttaattataattgcagacgaatttgccgagcttaagagtgaccaaccggagtttatggcagagctagttagtacggcaagaataggaagaagtttaggagttcatcttatacttgcaactcagaagccagcaggtgttgtagataaccaaatttggagtaactcaaagttcaagttatgtcttaaagttcaagatgctgaggatagtaaagaagttttaaaatcttcacttgcagcagatatagttgaacctggtagagcgtattttcaggtgggtaacaatgaaatatttgaacttttccaatcagcttggagtggtgctaaaaagtacgatgaagacgatgttaacaaaaatgaagttgaaatattcaatgtagggatagacggaactagaagcttattatattcaactaaggataaagaaaaagataaaaagagaattactcagcttgaagccgctatagaagaaatagacaaggtatgcagtgaaaatcatattgaaagacttgatggaccatggttaccacctttagaggacgaaatatatttagatgatttacttaaagacagtaaaacaggctttaatggcaaagagtggattgaagatagagagtggatatgccctacaattggaatgcttgatgacccagaaagacaggatcaaagacctcttaaaattgatttgggtgaattaggacatttattattagtaggagctcctggttacggaaagacaaccttccttcaaactctaatgatatctttaatgcttaactatacaccagaggaagttaatatgtatatattagactttggtgcgagaactttaaaaatgtatgagaaatcagcatatgttggtggagtagtaacttcagatgatgaagagaagcttatgaacttaataaaatatcttcataaggaaattgatagaagaaagaaaatattctctgataacggagttggttcattaaaggcatatagagaagttggaaatacactaatacctcagattgtaataattttagataactattcagcgttaattgagttctatcaagaccttgaggatgaacttatattcctatcaagagaaggtggaacacttggaattagtttagttgtaacagctggaaactacacatctgttagatataaggtaactgcaaacttcaaattgtccatagcacttacttgtgttgataaaggtgaatactctaatgttacaggaagagtaaggatggaacctgaaaataaaaagggtagagcacttataaatgttgataatttatatgaatttcaaacagcattgccagttagaggagagaatgaaggtgcaagagctgctaatgtgaaggaattaattgaagagttaaattcagcttggaagggaaaacatgcaaaacctataccaatagtaccagatattcttagcctagaggaagcagtagaagaattagaaggtaatgaagaattagagaagtactcctacactattggaattgattatacagaaattgaatatgtatatggaaacttaattgaaaatccacttattacagtagtgggaaaatcacagacaggaaaatccaatactatacaaagtatagcacacactttagctgtaaatagcggagttaatgaaagcaagatatatctaatagactctgaaaactatggattattaaaaatcaaggattcaaatttaataaaggcttacggatataagacagatgaatctagaaatataatgctggagattaaaaacgaaattgaacttagaaaagaagctttaaataatgctagaatgacaagtacaggagtatttaacgaaaaggaattcctagataatatgccactaattgcattatttattgatgatttaaatgactttatgcttcaattttcaagtgatgtggaaattatgcaaatatttgagggaatagttcaaaaggataaaaatcttaaggttgcacttattgtggcaggaacagaagaaaatattaataattatgcatactcttatgattttgtaaaagaattgaaaagcttaaattatggcttcttctttgacaatataaataactctagattctatgaagtaaatgttccatatagctataaagagaagaaatttgaaaatggcgatggatactttattgatagaggagaatttaaaatgataaaaataccattttttaaataatattatatataaaactaaaatgaaaaaaattaattaataaattgtatttgattaaaatatttttaataaaagatggtatgtgttgacattcaatagacaaaatggtatattcaatatgtaaaaaaacaacaaattttggagggaaacaaatggcagataaaattagactaaccgtatcagaaattgatcacacagcatcagttttcgcaaaaaatggacaagacatagaaaatgttttaaaggcattaacaaatgaaaagaacaaattagtatcaagctgggaaggtgacgctgcaaaagctttttcatcagagtttgatcagtttgcaccacaagtcactcaatttgcaaaattagttgaacaaataggacaacaacttaagagtgcttcaaaaacaatgcaggatacagatgcaaaagttgctagtgcattacatagataagatagattcttacttatcatattaaaagaaaaccaatttactctccctgtattttgcagggggagtatgttatataagggtataaatttaaaaaaatttaaataattttaaaaattttacttgtgttttaaagcacgaatagttattgaaattgaactgaaagaggtattttaaaatacaattaagatttttaaaggggtggtaaaaatggcagcaaataaaattgaggtaaataccaaaatgatattggatttatcaaagagatttaaagatgcttctaatacagccaaaaatacaaaaggaaatatgcaaaaggtaacagataggctcatagatggatggaatggaaaatcagttagagagttccagaacacatataaaatactatatcaaaatatgaatacatactcagatgcgttagatacattatctaaaaatttagagcaaatagctaagtcatttaatgatgcagatgcagcagtagcaaaaggaattagaggtcaaggtggcagtggaaaatctcaaggtgccagtaatgttgcatttaaagatgcgggagccgctgtgggaaaaggtgcagcaagtacaatagcacaaaatattaatccaaaattataaaattaagaaatatacggagataaggaaagaatgagtgaattagtaataggaatatcaacaacggatatgggaactgcaagaagaggaataaattcaactttagacttaataggaacagcaaagaaaggtctgagttcagcgttacagaaactagaaggcgacagcaattcgtcaagattaagaacaaagattgatgagattggtaaagagtataaggctatgcagcagcttgaaactaagatagacagggcaggtaaaaatatagactatgctgtaaataagtttcaggaagtagataataattgtgctagtaaattgaaatctagcagctatgattatagaaagtctgtaggactattaactaataccgagaaatatggaagtattgctggaacatgtttagactggggacaggcagctaaaaagaagtgtattgatactgttaagggtgcttggaattttgctaaggatacatgggataaggctaaagtggcatttaataaattttgggataagtatggaaattttattaaaaatatagcgattatagttgcagaggttgcggcaataattattacaattggtagcggtgttggagttattggagctattggtattatttatagtttggctaccattgttgattcaggagaacaaatcatgggagtgaaacacagtaatttggttgaagaaggtgaaaagtatttatttggggataagtggggagagcgtgtttattatggttcatctcttcttttgggtttaaaaggaggatatgatagttttaaaagtattggacaagctgaaaaaactataactgtagctaaaacgggtgttagtgaggcaaacacagctttgaaggaaagtagagaagtttatgatgcgaaaaaagtagctataggaattaagagtgaagaaaaattgtcatcggctcaaattgcagcaagtgaagcggctagtaactataagaacataaaaaatgatgcgaatgccacagttaaacaagttaaaaacgcaaaaaatggattagaaaaagctaaggatacattatcttcggcacaaagacaggtaagtaaagaagaaaaaattcttaataagagtaaatccattgttaatcaaaagagtatagaccttaataacgctaaaggtgtactttcacaagcaattaatgcaaagcgtaagtcaatatatagtacagtatcaccattcccaatgatgtatagtgaagacacatataaaggagtgtatgataattttattaaggataatgaataaccaatatttaaaaggagaaaaataaaattgaagaaagaagtaagatatttagaagaaagacctatttttcttattagatttattttaattacaatttttacacttgcttttattataggttttacatttatgagtgtagaaggaattattgaacctagaccaaatggacatcctattgtattagaatcagtagtaataatatcaatggttataatttggccagccataaatatattttcaagttgtaagtatgatattattttacgtaaagacgagcttgagtacacaggatggataaataaaagaataataaaatatgaagaaataaagtcaataaaaagtacagacgtagatatatggtctccatatggaaaaggctatgatgaaataagacagtttgtgcaaataaaattaaaaagaggaagacaaataaaaattttgttaaatcccaataaagaaaaaattgataaatttcatatggatttgatgaattttacgggtaaggatataaagtttcagaataaatttattttgtttgtaagaggatagtgattaaaaatgattagaactattataggcatcatagttttttcattaatagtaatagcttatgtggttatgcttataaggatggaaaaaatggcatttcattttattaaaaataaaaaaggaaaaaagaaaatagttggtatgagtttgttgattttgccaatatcaccatttttgatttttatatatactaaggacggaagaactattttgccagcatcatttttgatgattatagctattaggataataggaaattatgttgcaagcgatgaaaatacgtaggtatgtttattgtaatattaagtgaaaattttaaataaaaagaatcggattttatgaatttgtaaattaattgtagttatagtcttcatcacaaagagacatttggagaataattattatgattacatatatagtagcagttacttttagcagggttttcatattatttgctatatatgatgtagaaatagaaaaaataaaggataaaataggtttcaataagggaggacaaaatgatcgaagataaggtaatgtcaaaagcagaggaactaaataaaagaggaataatattcatacaaaaaaagcaaggcgatgaagcgttaaaatattttaatagagcaatagaagcagatccaaactttaaggatgcatattataataaagctttagttaatcttgccttagagcaagttgataaggcaatagagaccattgataatgtgcttataaaagatccgaatgaaggagaagcctactttgaaaagggaaatattttcttctactataaaaatgatgtaaaagctgctgtagagctttacaataaagcaatgtactttggaataaaaaatgaagcaatatattacaatatggcacaatgtatggaagctacaggagaaagagaagatgccataaagtggttagacagagtaataataatagacaataaaagcgtagaagctatgatgaaaaaagcagaaatattaattgacatgagaagatatgaagatgctataaattgttatgatggaattttaagaattcaagcagataatgaaggtgcatatcactttaaagcagtactacttggagaaacaaacaaagtagaacaagcttttgaaaccttaaaatcggcagaagaaatactaggtaaaagagaactgttggaatttgataagtgtcttttgtatgaaaaggaaaaggatttagagaaggctttaaactgcataaattctggaattgaaatagatgataagaatattctatatctatctaaaaaagcttcattattaattttattgcaaaagatagaagaggctaaaaaagtttatgattatatgatagaaatagcaccagaagaaatggaatcttatttttcaaaagcaagcctcctaatgttaaataaagagtacgaagaagcatttaagctttatgaaactataatagagaaatccgatgaagaaaatccatacagaataaattcatactattataaagcattgtgcttgaaaagtggaaataagttagaggaagcaaaagaagcatacgaagaagcagtaggaaagtacaatttattaatagttaagtatccttatgatcatcagctccatttacttaaggcaaattctttaagagatgaagaaaagtatgctgaggcagaagaactttatgaatatattttagatttaaacaagaatttagctgaagtttatcttatgagagctaaaaatagattaggacttggaaaagaaaatgaagctagacaggatttaaaaatggctttagaaatgaatgaagcatttaaaaaggttatagatttagatgaggaattaagtaagttgttagcttaaaataacgtttagtaggtgagaaggtatggcaacaaattcagatcaaataaaaatagatgtcttaaatataaatagtgcaatttctgcattgaataaaattgtaaatgacgaagaaactgcaaacagtaaattgaaaacagtggctaaaaatgttggagacgatttaaagtgcagtgcagtgtcaacattgactgaaaaaattaataaatgtgttaatgacttaaacagtcaaatagaaagtttgaagaatagtactaatgatgtaaaacaaatagttagtgactttgaagacgcagataaaagaattgcacaaagtgaaaatttgaatggttctacagtatatagaagatgatagattagatagaggggacaaactatgagcgcaaattatgatatcaaaataaatatggaaacgctgcaaagtgccataaatgagtataaaaattgtaagacaaccttagaaaatttacttaaagaattggaaagtggattaaaggcattggaaggaacagagtggaagggagcagcaaaagaggcttttgtgaacgctcagtttcctaattttaaagaaggtatgcaaagacactgtaatatgattggtgaacttataaaagaattacaagaaacagctaaagaatttacaaagctggataatgagttgaagacagaatttgcaaaagaagcgtagataaatattaatagtataggagaaatacaaatgaaaaagaataagttgaaaatattagcagcagcattaggggtaactattatagtaggattaacaggctgtaacatgaaatctatagggaaacttacttcaagtcaagattatacttatgaaaaattctcaaaagtaaaaacaggaatgacatataaacagacagaggatatattaggaaaaggaaagctaagttcatcagattatggaattaaaatatacaaatggacaaacaaagattcatcagaaatacaagtaagctatggaacagataaaaaagcgactacaaaaatcgaaacaaaccttgatgataatacagtaaaggttacaaaagcagaatatgataaaatcgatggaaagcagaaatacgaagatgtaaaagaattattaggtggagaaggaacaataacagaggtaacagattcaggcgcgggaaatgataatacatacatatggggaaataaaaagagcggatatataaaagtttcatttgtaagaggctatgcatcctttaaatctggaggaggacttaaataataaaagtcacaaggaagggatacaaatgaaaaagaatagaataaaaataatagtagcaattttaggtgtggttacggtagtgacattagcgggatgtgattctgctaataaaaaatcagttagtacaaaaaatacaaagagtacaagtgctaaaagaaccaaaaaagatgaaagtataaaaaaagataagtatacttatgatgatttcaaaaaagttaaaataggaatgacttataatgaagccaaaaagattttaggagaaggtaataaggaatcagatatattatatacatggagagactctgaaggaggcgagatagacattgtgtataatgacggaaaagctagcaatgtaaaggaagagagacttgacaaggatactacaaaagtaacacatgaacaatatgataaaatacaatcaaatcaaacttatgatgatgtaaaagctatatttggaacggaaggtacagttatagagaagggctataatgcaaatggtaatgatgataatcagtacatatggggaaatgaagaagatggctatataaaagtttcattcggagatgggaagacttcattaaagagtgatggaactaaataattatttaaattaaattaatcccgctgtaagttgatttacagtgggattaattctagtgcataaaagtagaggagctaaaggaaaaaaggattcggagcatacacatgaatttttaaagaaaatggaagaagatattaaagtcgcagagagaaaattagagggagaaaaataaaattgaagaaagaagtaagatatgtagaagaaaaacctgttttctttgttagatttattttgattacaatttttataactgctttaattataatttgtacatgcatgagtatagaaggaattattgaacctagacgcaatggacatcctattgttttagaattaacagtactgatatcattatttataatttggccgtgtttaaatatattctcaagttgtaagtatgatataactttacgtaaagatgaacttgagtataagggatgggtaaaaaaaagaataataaaatatgaagaaataaagtcaataaaagtacagatgtgattataccgtctccatatggaaaaggctatgatgaaataagacagtttgtgcaaataaaattaaaaagaggaaggcaaataaagattttattgaatcctaataaagaaacaattgataaatttcatattgatttgagtatatttacacatatggatataaattttgattgtagatttattttgcttgtaagaggatagtggttaaaaataaaaattaaaaaagaagaaataaaggtaacttctacgtattaatataattatggagagatgtatattttgagaaaagttaatagaagacttccctttcaaatatgattaaagtataaaatcaacaaactatagggtaatattttgttaataaaaaacgataatgttaatatattacttagaaggtaggagttttttatgattaatatagagacaaaatacgcaaatatgaataagcttattaagaatgaggaaattcaaaataaaaacagtacaaaggatactaaaattaaagatacaatagaaaatgcatcaactaaggataatataaatatttcagatgctagcaagaatatgacgacagctcagagagcaaaaaaagcttttgatgacactttcgctgaatttaaagattttaatactccagaaggtgatatgtcagactttgttagagaagtaattaaaataatggaggatttaaataagcatcctgtacctagagatataatctcaaatccaagaagcacagaaaccttttcagactttgtagatacaatgaagagctttgctcaaaatcagcattttattcagttgccaaagaagttttttgagttttgtgataaacttaaggaaaactttaaattaaatgggcttaggtaattatattaagacaaaagtgctataaaatttttagtacctttgttttatacatattggatgataaataaaatttatgtatttcagtaagtatctaatttagattatcacctgtaagtaacttaaataatagtttagatgttttctcatttaaattaatataatttccttcaggctcacgaacaagctctattttatccttccttggacttatccacatatcataacttatatcttctgaaggctttttttctttaatagcctcgaaataaaacttatactgaggaggatataccatacttacttttgcatctttccaattaatactgtttataatcttctttatattttgaacctccttttcatctttgatgttattgcaatattcatatttaccttttatagtagattgtttttctactaatagagtacttccctcagtattcttaactacatttgaacatcctaccgctagaagtacaaaaataaagataataaaaactcgattcattttcaacactatcaactccttgtaataattatacattaattaattttagtgggaaagatagtcagaaaaacacatatctttaggataagatgctttatcattgacaagaaaataggtgaatgttataattttacaaaaacatataataggaggaataaaagctcatgctaaatccaatctttatgactgcatagcaaaggctgttgcagtagaaagttaaaatctaaatatagcctttgctattcctaataaaaataaagtttttaggagagtaaaatgagctataaaaaagcaattaatataataccggattatctgcttgagaaggtgcaggaatatgtagatggtgagtttatctacattccaagaaaagcagaaaataaaaagaaatggtgagaaagaacctctacctgtgatgaattaaaaaaacgaaatgatcagatttatgatgattatcttacaggttacagtaaagagagcttagcaaagaaatattttttatccttgaaaagtatacaaaggataataagagaacagaaaaatagtgattaatattatatatgagtcaatacagttttattactgcattggctcatttttagttattaaatatatgtaaggtttagttttatgtacttagatgatactatttgaatataaaatatttacttagggggtaatatgatgaaaaatatttgtgacaatccacctgttatttttcctattagattttaataggaaggagtaatttttatgaaaaggatagactggaatatacagtatctatctttgccacctgtgattaagcattgtaagaagtgtggtaaaaaaacagaattcatttgttctggtatgtttcgaataaatgctcaacgtaaatacctagatgtatggttaatatataaatgttcaaattgtaattctacttggaatatgactatatatacacgtgttaagcctaaaagtattgagcctaaattattagaggcattccataacaacgataaagagcttgctgagagatatgctgttaatttggagttaatacgtaaaaatggagtggaacttggatacacaaagtataagataataggggaagatattaacttccgtattcctgtagaattgcatataaaaagtacttatccatctcagcttaaggtagctgctttgattagggaaaagctaaatttgtctcaaagttcatttgaaagcctcataactaaaggcttaattcgaggggatactgagattaatctgaagaaatgcaggctaagaacggaagttatagtgattattgatagtttagattggagtgaagtggcatttgctttagcgttgtagattaaggacttagggcaattagataccttaaaaataaaagaattatataaggtttttactatgtaattctaatatatagacgagacaattataagaaaacatgtgctacaattacatcatagaaaaatatttaaacgcgtgagaatattttaaattagctttgttttaagtgagtatagaaattaatacttatttaaaacgaagcttttattttacaaaaaattattttggttatatagaaaagaaacttaaataactaaaaaattgaaaggaggtgatataaataaaatgttggagttatacaaagtgatatatgaaattgttagtccaattgttgattcatattatgagcattatccaggaggaaaagaaaaagtgtatccctatgcagaaattagtttccctaaggttaaggctaataatgagtacagtagtcttaatgagctgtatatagatatttgggataacaaaagtgaaaagatagaggaaattgaaaacattacagataaactagtacaggctattatgaatggtttaaatactaggataataaagacagataatatgtttattcaaataaataaggataagacatatagattggatcttacagacactgatgcaaacattatatacaaggatacaacaaataggttggagcttcaagatattgatgaaatcactcagcgtcgagaacttagatttttaattaaagtatatgagaggaaggatataaaatgataaatacaaataatattaatacaaatggatttacaaataaaacaatggagcacttattaattgattcaggagcaatttataaaaactttggattaccagatcaagctttagttggagctacttcaggtggaaatgagtttgatgtaaaaacaaaaatgagacaaataaaggttgatggagtaaaggctgcaaatgctaaaggattagagttagtggacagcgtaacaacaactttaaaatgtacatttatagaaatgacagaggaaattttagcatcagcacttacagcaaatatagatagaacagcagatgataattatgatgttataagcggaaaaattcaaatagatgattctgattatataaagaatttagctttagttggaacactttcaggaagctcaaagccaataataattttaattgaaaatgcgttatgtttagatggtttgcagcttaaaacacaggatagtaaggataatacagtagcagttacatttacagcacatgcagatccagcaaatcctgatgcattaccatacaaaatttattaccctaagattacaagtgatgcatttaccttaagtagtgcagcagtaagttcaggaaatatagttcttacaatgagcgatatagtaaatgaaacattatataaagatggttttacagtaacagttgcggataaggcagatgctattacagcaatcaaaaaaggaaatgatgcaaaaacaatagaaataacattaacaacagcaccaacaagtggtcaaagtgttacaatttcatatgcaaaaccagcagatacaagcaagcaggttaaatctgaaaatggtgtagtactagaggatgttgcagttacaaatgtaataaataactaatataagttagggggaaaaagtatgagaaatttaaaaacaagtgatttatttagcttaagcagaattttaaagaagatgaatataaaagatgaattgaagagacttgcagcaaatattacaggtacgcctaaagaaagaaagaaagcagagaaagagcttgaaatagatatgattatgctctttatagagaatatttcaaatgcagagcaggaaacctacaaatttcttgcagatttaagtggtaaaacgccacaagagattagtgaacaagcaccaaaagaaacaataagtatgataaaggaagtattctctaaggaagggtttaatgattttttatccttagcctccaagtagatgaggcggacttcctagatgtgctcttaagtaggtataatccatttgtaatggaattagatatgttactaggaattaaacttattgaaaaggcatatgaaaagcagttagatgaaaagctatttgaaatgtggaatttaaacaggttatttatgacggaaaagaactttgaaacctttgaggagtttagagataaagctattcaaactaaggaatcaacaagagaagtaaagcatgagaaggaagatataataaataaagctgagaggattatagctgcttggaaaaggtgaatgccaatatttggagttaagtgctgtagagtttgatagaggaagttagaaaaaataatatatagatatttgataaaaatgaaaaataatctatcttgccaaaccttgttaaaagttgtatatttaaaacaaactttgtacgggaggtttggtatgggttatattattattgcgttagtaattgcaatagctcttatagcagttcttaaatggaaggcgttaatagttattggtgcaatcttcatcataggatatttcttaccagataatagtaaaagtagtgctgaagatgaaaaactagaaaaaataatgattcctaaagggttaagaaaaatagagtattatggaggatacaaaacagagcttagtagtaagctattttttgaaaatagaagcaacggtatttgtctttatgataaagaaaataatttcaaagtacttattttaaaaagaaatatattaaacttttctataagtggcgaatatcatagagatacaatagtttcaggtggagaaattagaggtggaggttcgtctattggaggggcgataataggagaacttctagatggtaatacaggagcaataataggtagtagaaagaagactacttcgacgccaataaaaacagaggtaaagactacagattcaagaaaaataatattgaaatttaaagaggatgaacaggaaagaggtatgattttggataaaagcatatgggatgatttatgtttcttgtgtccagaaaagaaaattaaatagacatataaaaagagcttgtacgagctcttttttgtttataaaatgtcagagaggagggacaatatggggttattaagtagtgtgttgttagaagatacagctgtttcaacaatgataagtaagcttgataaaggttttgagaaaattatagataacgtattaaatcttagaaatcagctgattgaaggaataggtttaaaaaatattttgaacgatgtaattgaaggtgataatgcactttcacaaatgaattctatactaaaaaacactggagaggctagtggaatgactaaaagacagcttatggagctggcagaaggtgaaggaagaataacagcttttagtgaaaatactaatattgctacagaaaatctattgctgacatttagcaatataggcaaaagtgtttttccacaagcacttaaaagtgtaaatgatatgtctcaagcactaggtaaggataccaaaacttcagcacttgaacttggtaaggctttgaataatccaattgaaggaataagtgaactagaaagtgtaggagtgaaatttacagcttctcaaaaagatcagataagttctatgcagcaagcgggaaatatagcaggagcacaaaatataattttaaaacaattggagaaacaatatggtggaagcgccgaagctgctggaaatacattttcagggcaattaaaaatattaaagaataatttggtaagtgttaacagtgagatgttaaatgggatgatgaaaactctaaccaattttttaaagcaagttaatagtcttgttttaagtatgggaaaaataacaccagcaactcaaaaagcagcagtggcttttgcgttaatagcagtggggattaaacctaccttagatgggatgaataaatttttagctttagcggttaaaaataaaaacgaaatgaaagctcttataataagctacaagaacggtgaaacagcaatacagaaatttgcaaattcaattaaaatactaggtggtaaggttggaaattcaagtggaataaaaaaacttcaatcggcaattgaaagtttgcaaataatatcactgtatgcaatggataaaatcaatcttaaggttaaaaatgcagcatctgctataagaaaaagtatgaatggtgtgttcgataaacttccagaaggactaagcaaaaatattaaaaaggttaacagtgatttaaaaattagtatgtctggtattacaggtacaatgagtaaagtcacatctaaaatgggcaatatgagtaaaaagattatatcaccattagctaatattagtaagaaatttgtatctaatattgttggcattagtaaaaaagtcacacctgtatttaagcttttaggtaaaaaaatgacttcaggtttaacaggattggttaaattaggactaaaagcagtgggacccgcagcattattggcagcagtacttgttggcttaggtgtgcttcaaatgcagtctggcaaaaagttggattctatttcaaaacaactaatagcaaaagggccgaagatgatacaacagtttactgcaaaattaattgcacaattaccacaaatcatggcggcaggtacaactttattaaacaattttataaaagttcttacagcaaatgcgccagctttaatacatgcagcagcttcaattataacagctttagttaatgggttagcggtgaatcttcctaagatattaccaggagtaataaaacttattcagactattttgcaatcgattattcaaaatctacctacaattatcatggcaggacttaggataatcttagcattagtacaaggaatcactaataatcttccacagataattaactcaattatacaagtgacaatcacaatgattaacacactttcacagcatcttccacaaattattgaaatgggacttaaaatacttgtggcaattgtacaaggaatagttaaggctatacctcaattaatagcagcaattccgcaaataattagtgctatatggaatgctattaagaatgtaagttggcttcaattaggaagtgaaattataaacggtatcattggcggtattaaatcagcaggagaaaatttatttaacagccttaaggatttagctggtaaagctctaaatgttgcaaaaaatgtgcttggaatacattcaccaagcagagtatttaaagaagaagtaggtttgtttattcctgctggagtcgctgaaggagttgaagaaaacacaggtggagtagtaaattccttaaatggtatggcaagcaagatggtaacaagcattggaaagaataaaagcaatatagtcgatgcagcaaaaggacttgttaatatgaatttttctactatgggaagaatgaatctagcagtagctggtaatacatcaaatcctttttcaaccggtggtgataagtacaatgctttattacatgttgaaaatcttagtattgcaaatgattatgatattgaagctttggctaataaacttaacttttatatgcagaaaagtaaagcagcaaaaggagggagatagttatgttttcttttaattttttaggtaaagatagttataaagattttggagtatatgttgaagaaagaccatcaatgcctctgcctgagagaaatgtaacacttacagaggttccaggacttaacggaagtttggtggaggatgatggaacttataaggatattgtcgtatctgtgaaatgtaatgttatagatgataatctccctaatatactagataaaataagagcttggttaagtagtggtatgggagatttaatattttcaaatcagcctgataagaaatatgagggaagagttatagagcagatagatatttcccaggaaactgaaattttgggaagcttccaggtgaattttcaatgtaagccatttaagtatgaggtgaatccacaaataataacacttatatcgaaggggagtataagtaatttaggaagctttgaggctaatccaataattaaagtatatggaactggaaatataacattaaatataaatgataatacagtaactttaactaatgttgtggattatataactatagattctaagcttatggattgttataaagacactgctttgtgcaataatcagatgggtggggaattccctaagttgaagcttggtgaaaataccctagattggataggtaatgttgataaattggaagtaacacctaattggaggtggatttaattgatttgtttatatgatggaaagacagcattaaaagaagaaaattttaagaataatggacttgtggttttaagcgactgcaagtcttgttttatagaggaaaaattaaatgatagctacgagttaactcttgagtatccaatagatgatagaggtaagtggcagtatcttgtagaaaaaaatattataaaagccgatggacagctatttaggatttatcataaagaaaaaaatttagaaggtgtaactgtaaatgcaagacacatattttatgatcttctagataattttattgaagaggtaagtatagtaaatacaaccggtgttggagctgtagatttaatacttaataatactcaatttccacatccctttaaagtaacgggtgatgtttcttcaaatgcatcagctagttatgtaagaaaaaatgttgttgaagcaataatgtctagtgatagttcagatggagacggctcaggaagtattcttagtaattatggtggagaattagaaagagataattttatcattaagtatttaaacaatagaggggaagatagaggggtaactgtacggtatggcaaaaatattgtgggtatagaggaaaccttggacatggatgatgtggttactaggattatgccattgggaaaagatgatttgctacttttagaaaagtatgtagattcaccgcttataaataattatcataatcctatcgtacgtgaagttgaattctcagatatagatgatgaagctaaattaaaggaagcagctgaggcatatattcaaaccgtagataaaccaacaattaattacacagttgactttattgagcttactaaaacagaagagtataaaaattataaagtacttgaaagtgtatacatgggagatacagtaactgtaaaacattcaaggcttggcattgatttaaaggctgaggttataaggataaaaaagaatgttttaactaataggatagaagaggttgaacttggagattttaaaaagaccttatcagatatgtttggtgatttaagtaattcaattagtgatacccaatctatgataaataaagttaatgacgatgtaacaattcaacttgatagtaagatagaaagctattatcaggataaggatcctaagatttggagtactgaaagcaatttagcacacaatggtgatatgtggtataaaacagatacaaaacagttgtatagatttaatggttctacaggaaattgggatgaaataaaaagccagaatgctatagatgcatatgaaaaggcttcaaaggctcaagatatagcagattctaaaagaagagtttttgtagctcagccaaatccgccttatgatcaaggtgatttatggtctcaaggaaaagaaggggatattttaatatgtataaattctaaactctccggagcgacgtatgatgcttcggattgggagctagcaagtaggtatactgatgatacaaaattagtagaatttatgaatggtgtttataaaacggataaagctaatatgcaggctcaattggatggtgtaattgacacttggttttataaaggggagcctagtttagctaatgaaccttcaagtgcttggaaagatgacaatacaaaaaataatcatttaggggatctatattatgatattgatacaggatatgcttacaggtttgcgttagtagacaaagaatatcaatggcttaaaatcactgatattgatgtaacagaagcgctaagtaaagcacaaaaggctggagatacagcagattctaaaagaagagtttttgtagcgcaaccaatacctccttatgatattggagatttgtggtgccaaggggatacaggagaaattctaacctgtcaaagaagtaaagcgcctggaacctcatatgctgagggggattttcagaagcttaataaatatactgatgatagctacgctaagaatatacaggttggtggaagaaatttattaagaaatactagtaactttaaggacacaaattattggtttttagaaacaggaactaatcaaaaaacagttttaaaaattgtaaatgatgatgtttatggttctgtaatttatattgataagcagaatgatgtttcctggagtgtaattcgtaatatattttattcttactatactcagttatttgatacagacaaggagtatactttgtcatttatgggtaaatcaactgaaaacaaagagttattagttgcatttgtaaatggggatggtactaattggtgtcttgaggaacaagagtttcaactatcagataagtggacaaagtttactgttacgtttaaaccaaaggaaaaaggagatcaaccctgtttgtatattatcaccgatattggtgaactttggttaactaattttaagttagaagtaggaaacaaagcaactgactggacgccagcgccggaagatactcaaagtcaaatagataaaactcaaaaagatgtggataatgcattaagtacagcaaataatgcaagtataaatgctacaaatgcaataaatgccatagataatatgtcacaggataacaagttatcgccaattgaaaaacagaatttaaaccaaacttggtttgctatacagtcagaaaaaagttatattgatgctcaagcagatcattatgagatagataaagctaattacgataatagttatgctgcactagaaatgtatgtaactccactaatatcagatattacggttacttccgatattgatagcaatacatttaaaagtaattttataagttattataatgctaaaaatgaattgttacagttaatagttaagaaagtaaaagaaaatttagatgagttggaaaataacggtgtaaatttgattgtaggatcaactgataacttacacacgtacccaagtgggcttataggtgtaaagcaatcagataatttttggagattaggactaaattcaacggatgaaatattacaagataagactacaaacataattgaaggaaaacagtatacagaaagtttcttattcaaaactgatgggatatttaatagcttcagcataaccttttttactaataatggacatcatccaattcaagcaagtatacaagatagaggaaatggagtttttaaagcatatgcaacttatacaacacaggttggagatcaatatataagggctcttgatattaataatataaatattactaatggcacatatatagatatactgaatccaaaactagaaaaaggcaacaaagcaaccgactggacaccagctccagaagatactcaaaagaaaatcgatgataattataatgactataaaaattttataaatacaatctacaacaatgataaatcagcaatgcaaaagtccatagaagatgctacaactacgataaattcagcactaggaggatacgttctaaaacgtaatagtgagctacttattatggataataatgatgtaaatgcagctcagaaaatatggagatggaatgtaaatggattggggtatagttctacaggatacaatggaccatatgccacagctattacgaaagatgggaagattaatgccgattttgtaactacaggaacgttagatgctaacgtaattaagactggtgttttatcaagccaagatgattctcttaagtttgatttaactggaggaagtatgaaaacttctgataatcaagggaactatacaacaatatctgctggaggaataaaacaccatagcacattaaagggtataaggtatataagagcttatggtagtggaagtacttcaaatacaggtactatggaatgggtaaatattgctgcatacaatgcggcgggaacaaatgtagcatatcaaaaagatactagttatacaggaacaagattaagttcagatgatgaatacaatgttgttcttgacagagaggatgagagctataactttggagtagctacagatggttctaatcagtattttcaagtggatttgggagtaattgaagaggtaaataatataaatgtaaagcacatatgggatgattctagagtgtatagaagtagtattgcagttagccaagatggtaatagttggacaaatatatttgatagtgaagctaaaacacataggaatataaggtatataagagattggctcaatggttctaatatagataatactaacgattgggttgaaatacaagctatcaattcatctggtcaaaatgtggctcaagggaaaaatgcttggggatcaatgggaagcaatttaacttcattaacagatggaaatcttgataaagattctgcaaaggtacattcttctgggttatcttatgtgattgtggatttagggcaaaattacaatgatattcaaacccttaaaatttttcatttttatggtgatagaacctatcatggaacaagaacagaagtttcggaagatggcgttacatggtattctgcttggtcaagtgctttagatggtggggaatattttgaggctagtagtgggcattcaatagatattactagtgtgtggaatagatatgcagaaacaaatacaggaatgaattttagtgtgcctgaattaccagtagtaaataataattcagaataccattatttattatacagcgggaaagttgtgttgtcagacaaggtgcctcttgcgataatacatttaccagcagagtttgtagggaaaaattacagtgtaaatgtaaatcctgcaaatatagttaattactcggatggatttatgcttaagagtttttgttgttttgtatcagaacagcatgatgattggtttggcataaatggaagctgctttgtttgtcatgagagtaattggaatgaacctatattaataaatttggaagttaattatacagtagtagcgtgattggaggaatgtacatggctacgataaaagaaaatgaagataatatgaccatattttattctaaaagttcaggtgaaattataagtttagcgacaggaatacaagacatgaatttctttggtaaatttaaagatgacatgtctcagataacagattttacaataaagccaaaggataatttggttatccaaaaccatactagtttcataattgatgtaaatacaaaagaaataatgatgaagcagcagcaaaataattataaagtagtttctagtagttagagtataaatttcaagtgtgaaagaattgcagaaaaataacaataaattaaggttttgatgaaaagagttttttaaatgttaaggtaataggactatggcaaaccatggttctttttttatattaaaattggaggagatagagatggatataagtgtaaatgaaattattgcgtatattttttatattgttattattagtattggtggatatatagctaaacaatataaagcacatagtaaacagcttatagagcttaaggaaatagaagaaaaaaaagcacagaagcttttgggagaacaaaattatgaaaaggcaagacaaattgtagtggatggtgtttataggacagagcagttagccaaagaaatggtggaagaaaagtggaattctttagataagcagaataaaactcttcagtatgtgagtgaacagttacagaaggtaggtattcaaatttcacaggaggatatttgcaatataataaaagctacggtaggacatatgaacattaataatcactaaaaatagcaggatgaatatttttcattctgctattttgtattaaggtaacagaattaattaaggcacaaggaaatgttataataggtattgaaatatttataagattaaagaggatttaggatatgaatgtattagaaataaaaaatgtatataagaaatatgcttcaaacaaaaaaatcaatactatggtgttaaaaaatataaacttaagtataaaagacaatgagtttgtaggaattatgggaagctcaggaagtggcaaaaccaccttattgaatgtagcatcaggaatagataaatgcgatgaaggagaaataagtatttggaataataatatatgtaaaatgaagaagaacgaattgtccttgttcagaagaaataatatcggtatggtgtttcaagatttcaatctcctaaacagcttaactgtaaaagaaaatattatggttcccttaattttagataagaaatatgaaattatggatggaaatacggtgatggagcttgcaaaaaggtttgatatgggagagataatggacaaatatccttatgaaatatcaggtggacaaaagcaaagagcagctatttgtagagctattgtaaataaccccaaaataatatttgctgatgagccaacaggtaatcttgattcaagatcatctaaaaaggttctatcgtactttgaagttatgaatagtgaatacaacgcaagtatactaatggtaacacatgatgcctattctgcaagttactgtgatagagtagtgtttcttaaggatggttcaataattaaggaaattagaaagcagggggataagactaagttttttagctgtattatgaaaactcttgaggatttgaatactgtcaaagaaagtttaagggaggaaaaatagaatatgacctttagtgaaattgcatataaaatgtttaaaaaagatgctaaaaaatatagactatttatattatgcaatgtggcagcaattgctgttttatatagttttatatcaatagttttaaataagcagttcatgaattcttccatagttgatccgatgatatcaagcaatatatatgctccaactttcttcatagtaatgtttgcaggtatgtttattccatattcccaaagtgtatttatgaaggcaaggcaaaaggattatggcattttgttatcaataggtatgacagaaaacgaggttagaaaaagcgtcataatagaaaatttagtactgcatgcagtttcattagtagctggtctaatgtttggaacaattttatcattattttttttaggttttatacatagtataataggaatttctaatattaatgttactgtttctgtagtgtcatatgaaatggtaactgtatgtgaattaatattatttattatttctttaattgttaactgttatagtatggttaaaagtactatatacgcaaagataaagcatactgaaaaaactgaaagtacaggacgttatagtattaaatttatttttatagggctagttataacaattgcaggacttattctagttgcttttttttatgaaaataatgacaatattggtctaatgggtttattaatttgaacagtaggatcaacattgatattttttaatggagaagctttaattggatgctttgaaggcaggaattataagaagtacattagaaatatttttttattttcagatatgaaatattattatggtaaaaataaaaaggtgtttttggtaagttcatggttgatttttgtagtaatgtttttttcagcacttagttttattaattatcctagttccattaaatatgcttatacttatcatccatttcatatggcatatggagatataaaggatggccttaaaccattagatgataatgaagttgcatcaattgtgcataagaataataatagtataacacgaagcaatactgttaaatttttaaggaatagagtttttacagttttttctgttaatgatgtaaatagaacattaaaaaccaattatagagtcaaaccgaatttatttatatatgttcatccttatgatataaatgacggatataagagggaggacattaatataagaattcctagtattgatattaactctgatgatggagtaagaaagtttaaggttcaagatacaattattaaaccattgtttggtcaaataaattgcatatcaaataatataattttagttaatgaagatgattacaactggattgcattaaatggaacggattatgtgtttaagggtacattgcacttatataattttgctagctggagaaactctaatcctatagtaaatgaagtaaggaaaagattactaaaagggaataatagaagtaaggaagatgctttttataaaataagttcaaaagtagaggcatataacacgagcttaaagagttgtaattttttaatttttaaccttatatacatatgtgttcttttatatttttctgtttttataatgattcattataaattgatgatggaatataaagatgatcaaatgagatatttcagcctttataagattggaatagatgaaatagagataaaaagaatagtaaaacaaaaaatacttatgacatattttataccatttatatatgcggttataatcaatattccctttagctattatgttttcaattcacatatacatagtggtttagaaaatccaatcataataactacgtcaattgctttttttataatacatcttgttatgtgtaaattatatacaaatgtatattataaaagaattatttcagaattaccttaagaagataatttaataaaacaaggtatttacattttaggaatagtacataattataaatagatttcatccaaaattgtaacaaatattacggttaactttttctcaaaaagtaagataataatagataggaagtaatacagatcttaaaataaaacacaactaaagataagtcattttggagggagaattatttatgtttgtatggaaggacgaatttgagttagggattgataaaattgacaatgagcacagaaaactttttgaaatagctaataaaggatatgagcttttaaaaaatgagttttatgtggacaagtacgacaaaataatggatataatagtagaattaaaggagtatgctgaattccatttttcagaggaagaagattaccttgcaagtatagggtataagaagttgtttacccataagcttgaacacgattcatttataaaaaaggttgaaagttttaatattaaagaaattgactatgatcaagataaatatatacaagaaatgctggattttgttgttacttggatcaaagaacatatattagaaaaggatagagaatatatagattaagtatagtaagtgctgccttaaagttaataaaggcagcacttattttatactaaaagaatttaaaataagccatttaatgctttattgtccgtttttacaattgattttatactgctataaggtatttttagctcagcatgatccccagcagcatgagttataccgatactaataacaagaccatcctttgtcagataactaaaggcacttgaaggattttcttgaccaattggattatctgatttttcaaatgctgtttgtaaatagctatcattataagtacttatctctttagatatggtttgcgaatcaatagaactgttataaggaatataagctccttttctaaaagtatttataagtgtttgatttattgaaaacattccttgcaagttcattgtttttgcattatttatatctatgtttgtagtatacaattcattattaggatgagcactgcctttcatattagaagatcctaaatatctaatacttaatatatttgagttctgtaattctacagtgtaattaacgtttaaagttaagttttctataggttcattataatttggtagagttttagttttaattgcttgcgttaaattaaagccgtttatcacagaatctttaattaaattatttattgctaattgtttgttattatcgcctaaattagatatctgcggataattaatttttatgttagcaattgtataggtattttgagctatgctgtacatactactaggtttatttgttggagctggagtacttgaagtagctttattatttggagtattgctatttgtagttttgctagtacttttagtattattttcacttgatgaatttatgttttctgattgctttggatcttttgctgtactagtatttggagctttagctgtacttacctttgattgttttgaaggtgtttttgattgatcattgctttggctattgctgcaacctgccataataaaaatactggcaccgattaatgttgttaataatatttttttattcataatttataaaacctccgattatggatttaagtactattgcatgataaattatacatccgttgtgatctaaaattcaatggggatttaaaaaaatacatataatttaaagaaacttcaaaatttaactttaattatagaattaatagcttgaattcgggtaaattatcaataaagaataaattaactggaggtaaaaaatgcaaaatgtatttaatgtaaatcaaaagattggggatatagtagttaagtttccaagagctattgaaatacttaaaagatataaaatagatttttgctgtggaggagatagagtacttgaagaggcaataaaggaacaagggcttaatggacaagaaataatagatgaaataaatgaggattataataaatatataatggaggaagtaaaggatagagattgggcaactgaaccatattcaaaattaatagaacacgttataaacacacatcacgcatatttaaatgaaacgctgccgcgcttaagcgagcttacaactaaaatacttagagtgcatggagcaaaacattctgaattggctaaggtgcataagcttctgcatagcttaaaaatggaattagaacagcatttgataaaagaggaggaaatagtatttccgctcatacaggaatacgaaagaacgggaaataatgagactttaagtaatgctgtagaaaagattatagaattagaagaggaacatgaaggtgcaggctcaatactaaaggagcttagggaggttactaagaattatgagcttcctgaagatgcctgcaacagctataaagcagcatataaacttttagaggatgtagaggatgatacctttagacacatacatcttgaaaataatattatgtttccaaggcttgttagtgaatcaaagaagcataagtaataagaaggcgcaaaagtatttatcatactctagcgtctttttatgatttatttccttttaatagataccctccagagttctgggccgttttggaggtattcccattcaaatttttcctcgtgttctgctgaaagttcatagtatagtggttttggatcatggtcatttataagttccattgcctctccagatttaagcttacccaatgtatcaaatattactgcatgcttatctctagggggatattttcgcacatctacacttgctgtgaattcagacatttagagatcatcctttcatatctaatttattatttaagatattgtttgcttaattgcattattttatatatgaatattattttttgtaaataggtgtgagggaaaattgataatgttgtgttggggtatgtcatatgcttaagaaagagattaaggatgattttgtaataaatgaagagtacaaggatgaaggaagcattaaaataatagtgtacttcttttgtgatataatttaaaaataacactaaatatatgaggtaaacaaatatgattgataaatataatgaagaactaaaggcagattgtaaaaaatgttttggactatgctgcacagctttatatttttctgcgtcagaaggctttccagaagataaagaagcaggtaggccttgtttgaatttgcaatcggacttttcatgcatagtacacaaaagtcttagggataaggggcttaaagggtgtacagcttacgattgccttggagcaggacaaaaggtagcacaggttacatttgaagggcaaagttggagcgataacactaaatatgctgataaaatgtttgaagcttttattattatgagacaacttcatgaaatgttgtggtatcttacagaagtatttaaactaaataaggaccaggataaaaagagtatagaattacttatagaagaaacagaaaaacgtactcttttgaaggctgatgaattattaaaacttgatatagaagctcatagaaataaggttaaccttgtgcttaaaaataccagcgagcttatacgtaccaaaagtggaaataactcaagaaagaaaaagagggtagattattttggcgctaatcttaaaaaggctaatcttaggggagcagatcttagaggggccctacttattgcagcaaatatgagaggtgcggatttaagttacgctgatttaattggtgcagatatgagagatgcagatattagcggagcaaatttagaaaaaagtatatttgttactcaagcccagataaataccactaagggagattctaatacaaggcttcctaaaagaataactcgtccaagttactgggcaaagtaattaaatgtaaaatgtaaaggagcatgaaaatgattttaatttatatgccttgataaaaaaatatgtataaaaagttttatagccttttgttaggcttttttgttgtgcatattttggaggtatataaataatgaataagaatagaaattttatgcttttagctattattgcggtgctacaggggcttgttttttatggaccaattgcaactatctatcgtgaaaataggggattaagtgtatatgatatatttgtaatcgaagctataaacatggtattaatgattatacttgaagtaccataggggtggtttgctgataaattcggttacaaaaaaactctatttatctcgcttttagtaaattttatttcaaagatagttttttatagggcacattcttttaatttatttttgcttgagagaattttacttgcaatatcaatttcaggagtttcaggatgtgatattgcactattatacaattcggttgaagagaaagattctgagaaggcatttagcttatataattcgttttctgtagtagggtatcttatagctacagtaatgtctacatttataattaaaatatctatggatttattagtattagctacaatatttccatatgggatttcagttattgtagcattatttttgaaagatgtgacatgtgaaaaaaggggcaaagagagtattaaaagagtattgatgtttgtaattaaaagcccccaaattttaatatttctaatttctgtggctttagaatcagaggtttgtcattcaattacagtgtttttaaatcaacttcaatataagagagtaaatatagatattaagtattatgggttaatacttgtagttattcagattgtttcaatgatttcatcacaggcatataagcttactagaaaatttggaaaaggcaagacacttacgtttatgttattttctatagcaattagttgtatcttcttagtggaaataaaaagtgctttttttagcattttacttattgtaattattagttttagtgaatccattatacttcctgtagcaacagaaattgaaagtaagtcagtaagcctaggaaatagggcaactgttctttcagcctatgctgtgattattgacattatatcagcagttgttaatttagttataggtaaagctgctaaccattcacttagaatagcattttttatgtgcggcatacttgtcattttagcagttggtttaaatattatttattttacaatgattaagattttagatgtaaaattagaagcagtattgattacatacctgacatcattctgcattcattggaacatgtacgacattcattagcacatttttggcaatggggatcttgaaacatagagcactcttgagcacatttatcacaaattactgaacaaagtttacagtgatctattgcaaattgggcatccatagacataagagctgatgacatttgacacatttgagcacattcaaacaaaatgcttatacaagttcttctagcattaacatcaggttcatttaaacaagctttgaaacattcataacaggcctgagaacatcgattacatgcatcaatacatttttgatatttatctgttaccatagttgcaacacccattttaaacactcctctatagtttttaattattacaaatattagtctgcgttattaggatgtttttattcttaaagagaaatttttaaatattatatatgatataatattatttaaaaattagtgaggtgacaggatgaaatccaaaactattaagtcaaatataattttactaattactgcactcatatggggattagcttttactgctcaaagtgttggtatgaagtatgtaggaccatttacgtttaatggtataaggtttatactaggtgcaatttgtatagttccagtaatgctgttttttaaggaagataaaatagaagaaaacagtaaatatgcaagagcagctcttgttggtggaattatatgtggaatggttaattttttaggaacaacgcttcaacaaattggacttatgtatacaacggtaggaaaggctggttttataactgggttatacattgtaattgtacctataataggcatatttttaaaacatcatatgggcataaattcatggataggagttttatttgccctagttggactctatcttttatgtaatacgggaagcttttctgttggatatggtgaaacgcttgaactttcaggagcttttttctttgcggttcaaatatttataatagatcatttcagtaaaaaggcaaattgttataggttagcattttttcagtatgtaacctgtggtgcagttagtttaattatagcattatttacagagaagataacttttaatgcattatatggagcagcaattcctattctttatggaggactaggatcagttggaattgcatatactcttcaaattatcggtcaaaaaaatgccaagccttctcatgccgctataataatgagcatggaatctgtttttggagcgcttggtggagctataattttaggtgaaagaatgggtgcgaaaaacctaattggatgcggattaatgctcttaggtatgttagttgctcaaattaagcttacaaaaacatcaaaaaaacaaatcattgagaaaaaggctgtttagataaagtttttatcttcgtaatacaatatacagtgagatatatactaattgaacatagaagcaagcagagtattaaggtagaagtattagaaattttaaaggataaaatacctgcaaagatactcatgaaattataaattgagtggcataggatagatgaaagtattgattttgtatagtaaaaaacatatcctagaataaatccacctataagagcagtataaaaggtaacagttttaaaacttaaaccatgcaaaaatgcaaaaataatacattgaataaaaattgataaatgtactggtatttttcgtataagtatacctaaaatagcagctctaaataacatttcttcacatataggacttataataatagtagtaaatatgctcaaaagcgtgattttgtaagaggcgcttttttgaaataaatagtttaaattaaaataggagaaagtacagactacataggctgtcaaaagagatgcaagtaaacttaatacaacagtatataggactattgaacaattaatgttttttaaattgattggtatcaatagttttttcttgtttaaaataaaaattgttattagaccaatagataaaaaaagcagttcaagtccaatgccctttaaagaattgcttgtacaattgagaaaaattacagtaaaagctaaagatataaatataaaaaacaaatcagattttttcattacaaactccacctatatattaataattcttaccaaaatatatcataataatgagtactttacaaacaacaaatttccagagaaaaatacagtcgcttattacaataaaattaacacttgttacagaaaaaggctaattgtaatacatttgttatttattataagcaatatagtatatattttagttagtataaggttaaggtcgtataattaaattaaaggtaagggatatgaaaggaaaatcaagtgttatggaaaagttagcagaagttgtttctttgaaattgaacaagcatctaaaaatggagggtatagagttaataaaattaaaattaggagtagagataatttttataaatatatctaagcttgcaattttatttttagtatcgtactattttgggcttataaaagaaactattataatgcttgctgcatttggattcctaagatcaaatgcatttggactacatgcaaagaatagcatagtttgtacagtgatgtcccttttaatgtttgtattaggagcatatttaagtaaatatttattatttaataattatatggttctggcgtcttttataatcgtaaacctacttctatttagatatgcgcctggagatacagaggctcatcctttagttggagctaaactgagggacaagctaaaaaaacaggctgtacttatgggaatgcttttaatggcaataactttaataataccagatgaattaataaaaacatgtattagtttatcaagttattttgaaattataagtatattgccaataacatataaggtattaggaaggaggtacaagaattattatgaatttgaaagaacaattaaacaaagttaacgataagtttatcaaaggacttggtaaagcttcaatgaaaattggagaacaggcaaatggaaagtgtgtattggtaacattgtacgaacctaaaatgcctgaagagctacttaaggagaatattgacaaataaaacaataaataaataaaaaacaatggttataattaaatttaaattataaccattgttttttatttattgaaattatagtataatttaagagatatagtattacaaaaaaggggaatcgtatcaaatatgatgcagtatgtagaattagttggaattataatgaatttatacgtatcaatttttagcctgtattcatgcagaattaaatggaaaaggcttgtaggtatgatagtgataactgaaattatttcgttaatatttttaatgcttggttggcaacaggttacggttatggcttatctaataataccttgtatatttatgtatttacagacatcagatgtggttttaagtatatctctacctgtagctggatgccttataattattgtatgggattattttttaagtgttctgtataattatgtatttttagtgaatcaatcggttataaaaaatgatgtttcaatacactggattactttttgcattgagtttattggaacatatgttacaagtagaaccattaaaaaatttgtaagggataaatttaaagcttacaatggacacttgaaaggaacaataggtgttgttgcagctggaactcttatattgatgctttttgtattttataataccaatgtagtttttgctcctaataattctgtggtaaatagtaatacaatgagaataaaaggaatagtattatttttttcgtatgcgatattgctaataatagtaattcgtacaattttaagaggtattattaaggaaatggaactaaaaagtaaagaaaatgaatttcagagtttacaggaatatacaaataaacttgaaaaacttcataaagatatgagagggtttaggcatgattacataaatatattgttgtcaatggcagggtatatacaaaatagagatttagaaggtttagagagatttttcgatgataaaattatgccacttagtaaggctatgaagtcaaataactttaaaataggcttgcttcaaaatatagaggtgcctgaaattaaggggatgttctcagcaaaaataataagagctcaggaaactggaatagatgtatatattgatgtagcagaaagcataaagagttttaacatggaaattatagatttaagcagagtaataggaattttattggataatgctattgaagcttcagaaaaatgtgacaggccatccatgaaggttgccgtaataaacaaagataaatctgtcatgatagtgataataaataattataatgaggaaattccaccaatatacaagatttataaaagaggattttctacaaaaggtgacaacagagggattgggcttagtaatttaaaagatattatagggaagtaccctaatgttatgttggatacagttatagaggacaatcagtttaagcaaattattgatataaaaaacaagatcgaagaaggtgtttttaatgcttgaagtatttgtatgcgaagataataaggaacaaaaggagaactttagaaagataatagataattttataataatggaaaacttggatatgaagatatctgtagtaacagaaaatccagatgatattataaactatgtcattaaaaatagtgttagcggtttatattttttagatatagatttgaatgcttctataaatgggatacagctagctgctgaaataagaaaatatgatccaaggggatttattgtatttgttacaacacatgcagaaatgagttatttgacgtttctgtataaagtagaggctatggattatataataaaagataattataaaaatataggagataggatataccagtgtatagtggatgcacaaagaaaatattcagcaaaaacaacagatcttcaaaaaatctttactataaaagctgatgatagaattataaatatagaatttcaaaagattctttttttcgaaacttcttttacaatacataaagttgttctacattctgtaaataggcaaatagaattttatgcaaaaatgaaggatatagagggtgaattggacgactctttttatcgatgtcataaatcgtatatagtaaataagaagaatattaaggaaattaacataaataaaaggcgtatttatatgattaatggagaagaatgtctcatatcaactaggatgttaaagggacttattaaataaaacaagcattacattacataaaatccaacgaatattacaaaaataattagctatcacatatttatgatatattcatattatggtaattatgttgggaaggagaaaaaatggaatagctatggaattaaaaagtatagaaacagttggagattttataagtttaagtggtaatagtagacggctcacttccatactaaaagtaaaaagactcataagagaaaattactcaattataagaagtaatttactgaacacagaagataaagtagcaatcaaagaaataaaatattatgaaaaggaggaaagggctatagtaacttttaccgataatgaaaaagttgtgtttcaatcttatatatcaaaagatgaggaaataataaacaagttcataagatggatcaaccaaaaagtagataaagaacatagtttatatgttaaaaagatattatatgctgaaggatgtagtttttctgaatacataaaacccatcaattctataggtaaaagagaaatttttgattattactttaaatcaggggaacttttattaatactatatgtactaagatgcagtaaaattaaaagtaagaacataatagatatggaagattgtccgatattagatgaggttaaggatgcgttttattcaacaaatgacgtaccaagctttaatttttctgcaaatgaagtagcggaaaaattagtaaagtattctgtatacaatatagaattcttaccagaaagtaaaaagtctataacagaagaagagatatatcatataaaatgcgggtttgagtatatttataatatgattatgtataataaattggaattaatagaagttatgaaggttatatttaaagaagatatacttaaattatcagcggttattacaaatatatatgggcttaatgaagaagatttaaaaagacaattatattttatagatataaggtttataggcgttaaaattgcaaggagaaaagtaaacttctgcattagtgaaaggaaggagacaatagataaaaactattttataagtatagctaatgacttgggagaacatatgattaagcgtggaattattggtgttaaggattttgtcacgagtaggacatggataagcactactagagacggaaacaatcaaggttattcattatctccactaagtagcgaccttatggacggaagtagtggagtagctttgttttttgcgtatttaggacttgttactggcaaggattactataaagcaatagctatagaagctattcaagattctataaatcatattaataatttaaacaataatgacgatattaatataggtgcctttaaaggtatatcaggtgagatatacgctatgtggaagatatatagtgttacgcgtagtaattacttagaagcatctattgaaaacggtataagagctctttacatattagttcaaaaaagcaaggatatagatataacaaatggtttatgtggggtatcatgtgttttagtatcaatatataaagataaggattctaataaattcaatgatattataatgaatttaattagaatatgtatggaaaagataacagggaatatgagttctaaacaaatggcgttaaatgacgtgtacttaaatgatgctataatacttacccttgcaaaactattagaattaacaggtgaacgtagtttagtaaaaaagattaaagaattattcagtattcaaagaatgaaatataaagatatctttgctagatgggatagaagaatacttataactcttatggggagagttactttgaaaaaaataaattttcaagatgaatctatagacagggaaatacagcaaattagtaagtatattattaataacgggtttggcaatagtttttcttgttgtgatgatatgggtatcattgaagtattgaagcatactgcagctatcttaagtgatgaaaagttgaatagtagttgcataaagacattcaatgaacttgttaaaaagaaaataaaaccaactataaataaagaaataacttatgcaaatgaaaatatatcgttgatgaatggtgttgttggtctagcgtatagtttaattaggataagtagtgagaaatttgttccgaaaattttatggttggaataataatataattgttgtttataataatatattaaatttgtttatttggacaatgtaaaagcttggatatttaacaaatgatttttaagttaagtattcaagtttttgtattacacttataaaaattataaataaaattctataaatagtaccttgctaatattttacatgatttatttatggtataatatatactatatacgctaaaatctttttgaaattatgattttttaattacaacagggttgagtaataattataaaaattagcacataaatttaaagaaaattttcaaaaataaaaatatacatataaaaaagcagaagggggaaggaggactatttttgaaaaatactagaatcaaggatatgagggatgatgaacttcaggcttacattaaagaaaccaaaaaagagattgagcagcagttaaaattatatgttaagctaaataatgataagttatctaataatggtcaaatacaaaatctcaagaaaaaagcatataatcttaaggaagtttatgagtacataaaatgggcgaatgataaaatagctattaataataatgttgaatcaagctatggtactatacctaagcgtggagagatatggacctgccaacttggagaaaatattggttctgaggaaaacaaaataagacctgcaataataatacaaaacgatactggaaatgaaaagggaccaactacaataattgttccgatttctaataggcctaaaaaaatatcaactcatattgaattaagacctggggattacaagctcgtacatggcgaagtaaataagataacgggaacaattttatgtgagcaaattaaagttgtatctaaagctaggttgggaaggcatgtggctactctgaatagtgatttcgtcaacaaaatattgaattctaaattaaaaatttctataaaggtgtaatatatttatagaaatgtgcataaatatagaataaaaaatgaaaaatatgttgataaaatgaagttttaatgttatcattaaagtaattgaggtacatacctagatttgcctaggagactctctctcatatatttttgctaacttacttgacataggtcaggagattatataacatattgtggattggtatagtgccaatctttttgttttataaaaaagttttttttatagtaatttattttattgcatatatagttattaggattcaggaggataaaaatggatcaacttaggtataccatttgttttataaaaagagaagatgaagtgcttcttttaaatagagaaaagcctagctggatgggaagttggaatggtgttggaggaaagtttcaaaatagtgaaactccaatggaatgcatacttagagagatacatgaagagacaggaatgaagtttcaagaggccaaatttaaaggcatagttacatgggatgaaggagataaagatattggtggcatgtatctttttttgatagaggttcctgcaaattataattattctgtaccagtaaaaacacgagaagggattttagattggaaaaagatatcttgggtaatgaatcctgaaaatactggaattgcagcaaatgtacctaaatatcttcctaagatgcttaaggaagaaggcgaatttagatatcattgtgtttttaaaaataaaatgcttctaggggttaacatagaagagatttgaattaattacataaaaaaggtccatactgtaattgtagatattattacaaagttggaggtcagtatggaaccaggcgatatagttagaatagatgatgataacgaatggaaagggctttatggtgtagttaagtacactaatcaatcagaagcctttattttttgcgtgcaaaatccatgttatctttacaaggctacgactgaaaacaatgtagctattgttattaaaagatctgaaagataaatgtatcatttatcatgataaaatttcacacaaacaggatttggtacgtatatatcagaagttattttacttaagtttccgctaacttgatcaacactaaaaattgttaggttacttgaatcttgattagctgctatcaataagttaccagaagatgataaatcgaagtcacgaggagaaagtccataagtggaagtgtttgaatttagagtaaggagtcctgttgaattatctacatgaaagcaggaaatgctattatgacctctatttgatacataaagatagtttgaattccttgatatatggatagcagcacttccgtttttacctgtgtaatcagtaggtaaacaagatacgtactgcaattcttcaaaggaaccatctaggggagaatactttaagactataacctcagagctaagttcagtagctatatatgcaatttttccgtttggatgaaagattatatgtctaggcccacaaccaggctttaacttaaactcattaaatctacataaaatgccatcgtcaaacctataaagtactattttatcggttcctagatctacaacacaaagaaagtcgttaagtggtgttgttacagcacagtgaacgtgagaagtctcttgtctttctttattaggaccaaagccttcatggatcacaaatgaagatacagtatcaatgcttccatcatttcttatagggaaaacgtctactctagatgtatgataatttacagaaaacagatatgaattcgttttatctaatgagacataacaaggttgttttccagaaaacctttcgggtggattctcgtaaccaaatttacaatttaagagttcaaggtgattatttctatcatctacataaaatgaagctgctcctcctaaattgcctgacttaataacagaataagctgttttattattcatattaaaggtgaggtatgttgggttttctatttcgcaagataatattggagctgttgtttttctagagtctgaaataatgttaaaactataaatgcctctgctttctccattagtataagtgcctatataaaccttttcataattggacatatcaatacctcctttttattgtaattataccataaatacactaattatttttagttagggtgaacataataataaaagtaaaaaaagaaaggaaaatatttatggaggataactataagaatcttaaaattgcagagagaggtgtccgtatcagtttaattatatatgtagtactttcaatctttaagttttttatgggctatttttttaagtcagaagcacttaaagcagatggaattaatagttctactgacataattgcggctattgcaattattgtagggctaaaaatagcgagaaaaccagcagataaagagcatacatatgggcatttgagggcggaaactatatcatcacttctagcatcgttaataatgattgcagttggagtcgatgttgtgtacaatggagttaaaaatactatatttctaagaaatgaaaagcctgatattaaagcagctattgtatcgttgatttgtgccagtgttgtgtatacattatatcgttataataggtctgtagctgataaaattcacagttcggcacttatggtttcttcaaaagataatctttcagattcaatggttggttttggttctgcatttgggatatttgcatctcaattcggattcccatggatggattcaataacagcagttttagttggaataattatatgtaagactggttttggaattttccgtgaagcggtaaataatcttacagatgcgtttgatccagaaaaacttgaaaatataactaaaattataaaggatatagatggcgtaagtgatattaaagatattagggcaagggtacatggaaatagtattttattagatgccattatattagttgaccctggtttgagtgttagggagagtcatgagattacggaagctgtagaaaaaattcttaaagaagagtttaatataaggaatgcaattattcacgtagaaccaaatatagatgagttgtagtgtataaatcgagagatattaggctttgatttatatgagaaattgaattagttttataaatatataaaaatgggagtgatttaatatgaaaaaaataatatttgcaggaggatgcttttggggagttgaggcatacttcaatacaattgatggagtcttaaatacaaaggtaggttatgcaaatgggaatactgaagatccaacatatgaagatgtatgtacagatagtacaggatatgcagaggcttgctatatagaatatgacgaaaaacaattaaaacttgagaaactaatagatgcttactggaaggtagtagatccaacattgaagaatagacagggacacgatgaaggaacacaatatcgtacaggaatttactatgtagatgaagaagaccttaaagtcatattagagtctaaagataaagaacaagagaaatatgatgctccaattgttacagaaatattgcctttaaagaatttttatgatgcagaagaatatcatcaaaaatatcttgataagaatcctaatggatattgtcatataccaaaggaattgttaaaaaagcattaataaatatttttgcgattaaatggaggcgtttgtatgagaatttcagttattgaaccacttggaatttctgaagaagaaattagaagtattgcaaaaacaattacagatagaggacatgaaattgtaatctataatgaaaaaagtacagatacaaatgtattaaaagaaagagtaaaggattcagaggtaatagtgcttgcaaatatgccacttaaggcagaggtaataaattctgatagtaaattaaaaatgatgtctatagcttttacaggagttgatcatgttgaattgagtgctcttaataataaagaagtagtggtttcaaatgcttcaggatatagcactgaatcagttactgaattaacttttggacttgttttttctgtattaagaaatatagttcctttggataaagtaacaagggaaggaaaaacaaaaaatggcttttctcaaagtgatttaagtggtaaaacctttggagtaataggcacaggattaataggtgcttcagtttgtaggattgcaaaagcttttggctgtaaggttatagcatatagcagaagtaagaaagaagaactggaagtaattggagttaattatgtgacattagatgagttgttagctaaaagtgatgtgatttctgtccatgttcctcaaacacaagaaacaataggaatgataagtaaagagaaaattaagctaatgaagaaaacagcaatattaataaatgtagcaagagggccaattgttgataatgaggctttggcagaagcattggaaaatggaactattgctggagctggaattgatgtgtttgataaagaacctcctcttgatttagggtataggcttcttaaagcacctaatacagttgtgttaccgcatgttggttttgcaacaaaagaagccatggtaagaagagcgcacataaccttcgaaaatatagttaagtggcttgatgggacccctcaaaatattgtgaaatattaaataagcattcatatgatgtacgctgacaatactcaaacggcaaaatcttataataaataatattccttgtaatataaagcttattgtaggacatcaaggtacatgtagtaaatatatttacaaaagaaaagatatgcataatgtctttatcaatgaccagttatgtatgatttattggactacaagagaaaggtttaacgagagtgcttgagggttattctaaagcttagaagaatagaacttatatggcagcggctgttaataataaatccttaggtagactgccattatggacaagatataggggaatgaagcaatcataaagcttcattcaaatttagggttgagatttctaataacagtaagatctactggttaattaaatatggggtggaaatttgcataaaaaaataaataagcaagatttcaaggagaatcattaatgagaagcaaacaaaaaagaaaattaaaaagtgtatttatagtagttatagcattaattgttttattaagtgcagtgatagcagcagtatttaagttgcaaggtaaaaagaatgtagatgacaatcaggtatatagcgctaaggattttcaaaaaagttatatgatagtaacaagtgctcgtgaagctatggctaatctagaaaaccgtagaggaaattcaggaacgttaactgaacaggtttataagaatgatgggaaaaagatagcatatttaacatttgacgatggaccatccacaactgttacacccaaaatattagatacattagagagagaaaatgtaaatgcaactttctttttgataggttctaatatacaattaagcaatgagtcacaggaacttgttagaagaatgttctatgatggtgattctataggtaatcatacatatgatcataatcctaatgaactatttcctaataacaaaacaaatatagaaacatttatttctcaaatcgatgctacaaactttgctctaaaaagtgttttgggacaagaatttaatactagaatactgcgaatacctggtggcagaatcacaagaatacacactagagatgctaatctaaatcaacttgagcagatatttaatcaaagaggactagtagatatagattggaattgttatgattatgatgcagaaggaaaacctaaggtggcagaacaattgattcaaaatgttaagaaaacctcttatggaaagaataaattagttattttaatgcatgatacttatggaaaagaagaaacagcgaaggcacttccaagtataatagattatttgaaagttcaaggatacgaatttggcactttaaaataacataagcatgggtagtttttgaaggctgcccatttttgccataagtacattacataaatttcaatattatgaaactattttattataattagggtaagaatataatttgtaatttattaaaaaagggtaaatacagtgacaaattgttatagatacaacgtttaaatagaatttttattaaaaaaacaaaaaaactattgacattacatcaattaggtattattatcgtcacatacagtaaatgttagtgcagtaatttttaaaaataaatagtaattacaaagacaatgatgaggaagagtaaatagtgattattttttagagagtgagatactggtgggaactcataaatatagctattgaaggtagcctttgagtcgaaagttgaatttcagtaggctttttccggtttgaaccgttattatttaagtaaaaaatttgggtggtaccgcgcgaccaaaaattctcgccccaagcagggaattttggccgtttttttatataaataaatttctaaatattcttaattgaatagcacccacggatttctacagatttattatacaaaatattcataaaatttcaattgtcataatttttattcaattgaatatttaaataagataatattaaaaattattataaacaatattttttaggaggaaaagtgttatggaagaattaaaagtttattatgatgaggatgcagatttaaattatttaaaggataagaaaatagcaattataggttttggaagtcaaggacatgcccatgctttaaacttaaaggaaagtggtctcaatgtaatagttggactatatgatggaagtaaatcatggaaagttgcagaggattatgggtttgaagtttatgaagttgcagatgccgtaaagcaggctcaggttgtaatgatacttttaccagatgagaaacaaaaacaaatatatgaagcaagcataaaagataatctagatgaaggtgatgcactattttttgctcatggtttcaacatacattacaatcaaatagtaccacctaaaaatgtagatgtacttatgatagcaccaaagggaccaggacatatagttagaaggcaatatacagagggtggaggagttccttgtctttatgcagtacaccaagattatactggaaaaggtaaagaaatagcattagcttatggtaaaggaattggtggaactaaaggaggagttatgaacactaccttcaaaatagaaactgaaactgatttatttggtgaacaagcagtactttgcggaggaatatgtgcattaataaatgcaggatatgatacattaagagaagctggatattcagctgaaaatgcatattttgagtgttttcacgaaatgaagatgatagttgatttaatgtatgaaggcggaatggctaaaatgagatattcaattagtgatactgcagaatacggagattatgttgtagggaatagacttataaacgataacgtaagagcagaaatgaagaaggtacttactgaaattcaagatggaacatttgcaaaaaattggttgcttgaaaatcagacaggaagaccagcatttaatgctagaagaagaatagaggcagatagagaaatagagaaggttggtaagagacttagaggtatgatgagttggattaatgaaaatccttcaaacgaatagtaaataatatagggggcttttagtgcaatataattaaaggtaattggggcaactttacatattgtacttgctatgaaaaggactgtttaaaaatggtagaaaatcatttttaaacagtcctttattttcctaataaaaatagttattgacagctacttgtggataatgtggataagtattaaaaaatatttaatgctgtggataactcggaatatattaaaaaaatttgaataataattaatgtaatcttgttatggaatgatgtaaattggaatcaaacataattttagtagtaatactcggtatatcaatagtaggtaaagctacatctgtagctatttctgtggctgcattattaattttaaagcttttagggttagataaatatatctttccttatttgaatgataaaggaatgttttggggattagttttacttacagcagctatacttatacctatagctcaaggaaatgtaaaggctatagatataaaaaacaatttagtttcatttgttggaataacagcattagtattatcctttttaacaacatatttaagtggagttggacttagatatcttacagtccaaggtcacagtgacgttatgccttctcttattttaggttccgttgcagcagcagcctttctagggggagttccggtaggaccacttataacctcggggattttagcattgttagtaaagatggtaaagaaatcataagtcatttagtttttgaataaaaagttcagctactttagataaattgtttttatggcagagatatgagaagtatctatgatattcagtttttgttggaattatctttaaatccttatttttaacatcatctttaactacaagtgatgaaataaaggttattcctaaattgttttttacagcttgtttaattgcatagttacttcctaaaattattatgtttttaggatagatgttttcaatatttaaaaaagtatttagattttctcctgttccagatccttcttccctatgtatccaggtctgattagataggaatttgtttaattctatgtttttatcatatttgaaagaagagtgagaaacaaccaccatagtatctttataaaaattttttaacatatagttttctaaaggaacgtttccctcaattaaagctacatcaatatcgtagttcttaaatttgtcatatatatgtttagtgttttctattgttacctcaatcttaacatttggatattcttttatgaaatctcctaatattttaggaagaataaactcgcctatagtcatacttgaacccagctttaatgtacctgagggagagtatgtatagttattcaattcttcttttgtttcgtttaaaagcgagagtatttgttttgcacgtttataaagaattttaccagtacttgtgattaatatagttctttgtttattggaacgttctatcagctttgtaccaaaatatttttctaaattggcgatgtggaggcttacacctggttgtgatatattgattgagtttgctgccttagtaaagcttttgttatctactacagcaataaacgtttttaattcttctaccaaaaatctcaccacccataagaaattgtgataggtataataaataatatatattatacttattggttgtaataaagtatactatagttacaatattactacaatgaaaaattgaaatagtgaaaataagtcaggagaggtatagatgaaagaattaaatgaaattttactaggtgaaattgaggaatttagaaagcttggacatgattttttagatggaaaggtaagtaaagttgattttaaaggagcatcaggtggaatgggagtatatgcccatagaagcggaaaagaattcatgataagacttagaataccttctggaatagcatcaagaaaggaccttgaacttattcgtgactttgcaagaaggtatgaactcgattcagttcatcttacaacacgtcaagctattcaacttcatggaatttcaattgatactgtttgcgatataatggaagaaggaataagaaacggattatattcaagaggagcaggaggaaactttccaagaaatgttgcaatttctcctttaagtggagtagataagaatgaagcttttgatgtttcaccttatgcagaagctgtgggaaagcacttcttgaaaaaaatatatacttacaaattcccaagaaagttaaaggtagcattttcaaataatgctgatgatataggacatgcaactatagcagatttaggatttttggcgattaaagaaaatgaacatgaatattttaaggtattcatagggggaggacttggaagaaatcctaaggttgcagctacttttatagaacttgcagagccaaaggatgttctttatcacgttgaagctatgacaaggctatttattaatgagggagattacaagaataaggcaaaagctcgtataagatacatactagaaagaatgggagaagaagagtttataaggtgttatagtaaatatttatctgaggtaaagagtgaagaaaaacttgatttagaaatagataaaaaagcatatacaaagcatggaatagaaactactgttaagaataaaagactaattagtcagaagcaaaatggattatatagtgtgtatgttcatccagttggtggacagctttctattaaggatttagaggatatattaaaagaaaccagcaatattgaagatgtggagataaggctttcaatgtcagagggattctatataaggaatttaaatggtaatgaggctgaaaggattcttgaaattacagaacatataggcggaaatacaaggcttgagtactctacagcatgcataggagtaccaacctgccaaatagggcttctagaaagccaagctacattaagaaatataatagattactttaaaaagatgaaatttgagtatgatgttcttccggcagttcatatatcaggatgtcctaattcatgtagttgccatgaaataagcggcataggtttttgtggaaagaagaagagggtttctgaagaggttaaggatgtatttgagctatatcttaaaggaaaattaaaaagtggagctacaaggcttggagattattatggagatgttttaaaggaagaagttccttaccttttatatgatattgcaaagattgtgcatgaaagcggcgaggagttttataattgggtagaaagtaacgatgagaaattgaaaagtattgtaaataagtatttagtttgataataatgtagggaaatcattaatatagatttccctacattgcatgtataagcacattatatttgttgtttattgacttttcaaagtatataatgtagataggtttagtataattatactgaaatatataaaggcggggagggaagccgctttaaaatgttttattgcggagatttatgatacaacttttagcattgaaaagagatttaaaagttgaaataagagaaaaattttcaataatagagaaaagaataggagataaggatgtacttttaaaggaggtatgcaatgaagttgtcatattaagtacatgcaatcgaattgagatatattttaatagtgagaagaataggaaacaaattatagaagagattttttcaaagatgggatggaacataaattttttagagaattttttctattgtaaaggtgatgaggcaattaatcatctaatggaagtggcatgtggctttgattctcttatcttaggagaagatcagatattagggcagataaaagctgcatatgatactgcgcttaaaaataaaacttcaggtagtgaactaaagaagctgttccagttagttattacctgtggtaaagaatttagaagtatatctatgcttaatagaatacctgtttcatctgcatcgatagctgttaataaggcaagacaggaaaacttaagaagatttatggtttttggctttggagatgtaggttctctagtatgcaaatatatattatcaagtgattttgatgtgttatatattgttgttagaaataaagcagctgtaagtataaaagataaaagaataaaggtcctttcctttaatgaaaagaatagttactatgatgatgtagagtgtatgatttcctgtacgtcagcacctcatcctgtaatatgggagaaagagcttccttacaggaaattcactattttcgatttggcagtaccgagagatgttgaagagactgtttatggtagaaataatatagatatatatgacatagatcagataagcatgatagataataataacagaaaaaagagaaaagaaataatgatggccaatagacatataatgtccaagtatattgtagagttctatgattggcaaaaggttcaggaaatagttcctgatattataaaattgaagctgtatggtgaaagcgtaaataaaagaagatatgaaacctttaagaataaaaaagctacaaaggataatgatatgcttgtaaatatgctcataaaaagcacgtcaaatgtatatataaatagagcaatagaagtgcttaaagaggagcaattgaaagggcgtggagaagattgcctaaggatattaagaaggatatttcagaagtagaaaatttatttatagcgcttgtctctcctaagttaaaaattctagttatagggggaggaaatgcagctcttataaaggtaagaaactttattaaaatgggctgtttaattactatagtttcaaaggaattcaaggaagagttcaatatgcttagtggatttcctaatataaaactgataaaaggagagtatttaagagattatcttaagcattaccatataattataatagcaacaaataattttaagttaaatgataaaataaggcaggattgcgattatataaataaaatgtatatggactgtggtgagcctgaaaagggactatatattgtaccgtatcaaaatgattcaaaaatgttttcgctttctattaaatccagatataaaagtcctaaaacttcaaagtatgttttggataaagcgatgacatttattaaaagatatgaggatttttcagaatatacagcaaacataagaaataaaattaagggaagtagaaaaaaagaaattatgaactttgtttgttcagatgacttttattttttttataagaaaagaaaagcggatatagtgcttcagatgttttatagagaattgaacggggagtgaattatataatgaagcttacaatagcaactagaaagagcaagcttgctcaggtgcagacagaactaataattaatgtattaaaagataaatatggcatttcctctgaaaagctactgatggaaacacttggagataaaatcctagataagtcactagcggacatagggggaaaaggactttttataaaggatatagaaagaattctcttagaggataaagcggatgcagcagttcatagtatgaaggatgttccttttgaggttccagatatgtttgaaatagcggcagtcaccttaagggttgatgtaagggatgtctttgtatctagagacgggactcattttaaggacttaaaaaatggagcggttattggaactagtagtaacagaagagcagctcagcttaaaatgttaagagatgatataaaggttgtacccataagaggaaatgttcaaaccagaataagaaaaatgggagaagaaaagcttgatggaataatacttgcagcggcaggacttaagagacttaatatggagaatataattacagattatttttctgtagaggaaatgattccagctgttggacagggagctcttggagtagagataaagaaggaaaacaagaatagagatttatttagaaagttagataataagaatagcagaatgtgtgttgaagcagaaagaagcttcatgagaactttaaatggggactgccattctacaattggagcttatgctgaaatagttaatgggcaaatgaatgtattgggattttacgaaattgatggaagaagggtaaaaaaagatgtgagtgggaatatagaggactatatgagtttagggaaaacacttgcagaaaaaattttggaggataagtaatgaaaagatctggtaaggtttatataataggagcaggacctggagaggaagagcttataaccttaaaggcaataagaaaaatgaaagaatgcacagctgtgctttatgatagacttgtaggacagggaatacttaaatatttgaatgaaaagtgtgagatttattattgtggaaaagagcctgggtgtcattataaaacccaagatgagataaatgaaatgataataaagctagctaaagaaggacatattgttggtagaataaaaggaggagacccatatatttttggaagaggaggggaagagggactaagtcttttaaaagagaatatagaatttgaagtgatttcaggggttacttctcccgtagctgttttaaattatgctggaattcctgtaacgcacaggggcatagcaagaagctttcatgtatttacggcaaaaacagccaatgacgattctataaattttagtgcagcggctaaaattgatgggacactgatatttttaatgggatataggcagcttaacgatataactagaaagctaatagaaaatggaatggattcaaaaatgccctgcgctgttgtaatgaggggaactactagtcttcagaaaaaggttataggaaatcttagtgatataaaagaaaaatgtgataatgctaatatgacttcaccttgtataatagtagtaggaaaagttgttggtttcaatcagcagctaaattggtatgagaaaaagcctctttttggcagaaatatatgtataacaagatctaaaaatcaaagcaaaactatgagagaagagcttcttgaccttggagcagaagtaacagaagtacattctatagaaatagaaaatacagcctcaaatttagaagaatacattaataaaatttcagagtatgattatataatcttgaccagtgtaaatgctgtggaggtcttatttgattatcttgcttcaaaggattatgatgtaagaaaagtaagggccaagtttgcagttataggaaatgctacaaaagaagcgctaaagaaaagaggaattgttccagagatagtatctagaaaacacaatggagaaggtctttttgatgagattagaggctatttaaagaaggatgataagatatttatccccaggagtgaaaattctagaaagtatataaaggaacaacttgtaagcttagggttaagtgttgacgagtgttttatatacagaacagttcctggaaagctttatgataaggctgcttttgaaaatgctgatacaattgtttttacaagtccatcaacggtaaaaaatatgatagctctttttggagaaaagaacataaagaaaaagagtataatcgccataggacctataacaggaagagagcttggaaaaataaatgcagaatattctacatgcagtgaatgcagtgtagatgcaataattagggagtgtttgaacagtgacaaataaagaaatttttgaggaatcaaaagagtatatgccaggaggagtaaatagtcctgtaagagcgtatatggatttaaatattgatcctcctataataaaaagtggtaaggactcgcatttgtttgatgaagaaggaaaagaatatattgattttatagaagcatgggggcctatgattttaggacataaaaatcaaaaggttttgaatgaggtaaaagaagttttagatgagggtgtaggctttggagcacctacaagcttggaacttaagcttgctaagtatatatgtactacagtagataatgtagagatgattaggatggttaattctggtacagaagctactatgagtgcagtaaagcttgcaagaggctatactaaaagagataagataataaaatttgcaggttgctatcatggtcattttgatggctttctagtagaggcaggctcaggtgtattaacgcaaaatatacctggatcacctggagttccaaagggaagcatagagaatacacttatagctgagtataacaacgtagaaagtgttgaggtgttatttaataagtataaggatgaaatagcagcggtaataattgagccagttgcaggtaatatgggagttataccagcaaaaaaagaatttttagtaaagcttagagagctatgtacagaaaatcaaagtatattgatatttgatgaagttatgtcaggctttagagttgcttataaaggtgctcaaagtttatatggtgtaactccggatcttataacttttgcaaagataatgggaggtggattcccatgtggagcgtacggtggaaagaaagaaataatgaagcagttatctcctcttggacctgtatatcaggctggaaccatgtctggaaatccagttgttatggcagcaggatatgcgtctcttagacagcttcacgaaaatcctgagtattacacctatatggataagctaggaagtaagcttgaagctgggatattagaaatatcaaaagaaaaaggaatacctttggttgtaaacagatgtgtgaatatgatgactatattctttaataaggctaaggaagttaaaagctatagcgatgcaaaagcatcagatacaaaaatgtttgcaaggtttgcagagcatatgataacaagcggtatttatgttccaccttctcaatttgaagcaatgtttttaggagtaaaacatacagaagaagacatagaaagatttttagacgttatgaaaaaattataattttaaggagggttaccatgtttagaagacatagaagattaagaaagaatagctatataagggatatggtaagagagactacattaagccctaatgactttatttatccgctttttgtggtagaagggataaatataaaaaaggaaataccatcactgcctaataattatcattattctttagacaggctaccagaggttatttctgaaattaatgatgcaggtgttaaaggtataattttatttggaataccagattataaggatgaaattggttcttctgcttttgatgagaatggaataattcaaaaggcaataagaaaaataagagaaattgataaagatctatttataataacagatgtatgtatgtgtgaatatacaagccatggacattgcggaattattcatgatggatatgttgataatgatgaaactctaaaatatataggaaaaatcgcactctctcatgcaaaggcgggagctgacatgattgcaccgtcagacatgatggatggtagaattgaagaaattaggactactcttgatgaaaacggatataagaatgtatctataatggcatatagtgctaaatattgttctgcgttctatggtccgttcagagatgctgcggattctgcacctaaatttggagatagaaagagctatcaaatggaccctgcaaatgcaagagaggctatgcttgagattgaagatgatattgaagaaggcgctgatgtaataatggtcaagcctgcactagcgtaccttgatatattaagaactgctaaaaatagatttgatgttccagttgctgcatacagcgttagtggtgaatattcaatgataaaggctggagccaaaatgggctggatagatgaaaaggctatagcacttgaatctttattatcaattaaaagagctggtgctgatatgattataacttattacgcattggaagcttcaaagtggttaaagtagatacatgtgcatagttatatttttacaaaagcgtcaactatagttaatatgtttagaagtaattaataagggatacccccatgctatgaatttagcatgggggtattttgcggagaatttatctattttaattggtaagatatataattcataaaaaatgtttaatgtaaataagttcgagtatatagatattaatgaatactctctaaaatataatacaatgtagatcaatagtatatataaatatgaattctaaagaaaagtataatattaatataattaaaagctaaaaataattacaaattataacattggagttaatcaaataaagagtttaccctttatatgaaaataaatatccacaaaacgacaaaaaaacatttaatattacaaaaaaacatatataatatattaatgggcattaataaaaatatgacagtatatatatatgtaattgtatttgatgttaaggagtataaagggaatgaggagagatagtatgggctttattagaaattttacaattaggtctaagttgttaagtttgttattgataaatgtactattaatagttatagtggttttattcatgatagagataagagcagagtattcaaagaagcgtggagatataaattcggtttattgctataatgagaaagtaataaattcattgaaggatgatttaggaatatcacaagattacattgttcaatatgtttacgatagaaacacacatgaatatagtaaagttgaactggatagaagaatagataaagtaaagcatttggataattataagggattaataaacaaaataggtacaggtataaatgaatacaactcagtgcttacgaagatacaaaattatggtgacaatgataatcaatatgagctaaaagctcaattaaataaaaataaggatataagagcagatattatagattcattagacagacttatggatgaaaacataaatcaagaatacatagaggaaaataaacttatagataagtatctagagttttctatagttacagttttaatagccttttttgtaattactttaattgcgagctttgtgttttatgacatacatggtatgttaaataagatattaaatgttattgatagaattttccagagtgaggctgtagatatggaatacaagatgagtagaaaggatgaactaggggttattttaaataaagttgtggattttggaaatcaattagataatattataaaaaatatactattaaagagtcaaagagatgagaacgaaaatcgagtaaaaaatagtagtaaagaaggatttgagacacctggtgaagtttatagaatcattgaagattcatataagaatattaatactttagtttctagagcatatgctcaatctatgaaagttagcaaagagataaaagaatttagcattatatcagataaaataaggttatttacagaaaaatcatataattccgtgaacaatataagggaaataatagacaagctacaagataaatttgaagatgccatatataatggtaagtgtttagtaaaagaaattaatagcactaactcttatgaaatagatatacttgaaatagataaaaataaatatgtaagtaattttaataaattgtttgaagttttatatgatgtggattatattttctttcgagttaaggatattatagatgatgaaagaaaggtatataaatccatagaggaaatccctaaggatatattactatgttcaaatatgttaacagaagatttgaaagacacaatcatggacatgaaggaattaacagccatatcccaagggcaattggttctagtagaaaggcttaataaattacttaaaaatgaataaattataaaaataattatagatgtgctaaaaattattgacatttccatagtaaagtgataaatttaatgtaaattaaaacataatattcatattaatatagtaggaattaagtggttaaaatagggtgaaaattaagtttttaccctattttaactaaaatgatcaaaagttttaagagaagtttttttaatattatataggcgcgaaaccttaattattgggaaataaagtacatgcttatgcaattggtattcagttgacatacagagatgaactttacatcattacatagtaaagtaatatgttttatatgacatgcaaaaagcgttaaataataagataacaaggggcgtagaggtatgaaattttcaacaaaacttattcatggaaactataatttagaaaatacaggagcaactaatgttccgatatatatgtcaaatgcatatgcgcatagttcacctcaggagctagagaatgtatttaaaggaaagtttcctggttatgtatacagtagattttcaaacccaacagtactggagttcgaaagaagaatggcaagcattgaaggaggacttactgcaacttcggcagcttcgggtatgagtgctatatatatggcaataaccaatatagttcatcccggggacgaaattattgcttcaacaggactttatgggggtacctatactctaatttcaaacttacagaatattggagttaaggtaatatttttagaagacataagcaaaaagacacttttaaataatataaacgaaaatacaaagcttgtttatacagaaactataggcaatcctaaattagatattttggatattgagtcagtgggaagagtatgcaaggaaaaagggataattttcatggtggattctacaatatcgacgccatatctaataaatccttcaaaatacggagcagacgttataattcattcaacgtcaaagtatatcaatggtacatcaaatgctataggcggaatgattgttgattgtggcagtgaaaagtataaaaatcatagatatgaaaattttcaaaagtatgctgaaaagtatgataaattagcattcactgccaagctaaaaagtacctcaggacttgatattggtgcatcaatgtcaccttttaatgcatttttgtcactaacaggaattgagactttatctttaaggatgaaaaagcactgtgaaaatgcaatgaaaatagcatcgtatttagagaaaagtgacaaggtaacaaatgttaactatcctaatcttaaaagctcaaagtactatgatttggcaacaaaatattatgcagatggagcttcaggaatacttacctttagacttggaacaaaggaaaatgcatacaagtttttagctaaattaaagcttatactagatactactaatataggtgactgcaaaacaattataatacatccagcatctacaatttgcattaataatacagaggaagaaagagaaaagatggcggtgtatgatgatcttcttaggctatcagtaggaatagaggatatcgaagatatattagaagatatagatagagcgctggaagcaatttgaggtgagagtatgaataataaaaaaagtacaaatgtagtgtggcaggaaactaaaataaaaagacagaatagagaaaaaatgttaaaacagaagggtgcagttttatggtttactggactttcaggttcaggtaagtcaacggttgcatctgcacttgaaaagaagctttatgaaatggggtacttgacatatttattggatggagacaatttaagatatggtcttaattctgatcttggctttaaaagtgaagacagaactgaaaatataagaagagtatcagaagttgcaaaactgtttgctgatgcaggaatcataacaataacaacatttatttctccattcatagaggatagaaataatgcaagaaagcttttagggaaagattttgtagaggtatatatagattgtcctattgaagtctgtgagaaacgagacccaaaaggcatatataaaaaagctagaaatggtgagatcaaaaattttactggcatcgattcaccttatgaaaaaccagaaaagccagaaattacggttgaaacgtataaggatactgaagaaaaatgcgttgacaatataattgaatatctaaaacaacataaaattttataggaggcagggtatggaattatcacatgatattttaaaaacagaccttcttatagttgggggaggaacagcaggatgttttgccgcaataagtgctgcaaataaacctagtattcatatattaatcgtagaaaaattcaacataaagagaagtggatgtcttgcggcaggtgtaaatgctttaaatgcatatataactaaaaatgaaactcctgaatcttttgttgactatgttaaaaaggaattcaatgaggttgtcagggaagacttaatatatacagcggctaaaaggcttaatagggtaacagaaaaagtagagaaaatggggttaactatacttaaaaatgaagctggagagtatgtatcaagaggaaaaagaagtataaaaataaatggagaaaatataaaaccaattttagtggatgctttaaagaaaaaagaaaatatagaagttttaaatggtgttaacatagttgactacattgttagagatggaaaagttataggagcctttgggttttcagttaaggaagctaaggtttacattatttatgcaaaggcagttatatgtgcaacaggtggagcggcaggtatatacaagcctaataatccagggttctcaaggcacaaaatgtggtattcaccttttaatacaggcgcaggatacgctatgggaataagagcaggggcagaaatgactacatttgagatgaggtttatagcactaagatgcaaggatactatagccccaacaggaactatagcacagggaataaaaactcctcaggttaatgcatttggcgagaaatatgttacaaggtatggaaagcctacaacaataaacagactctatagcactattatggaaaatttaaatggtaatggtccgtgctatttaaaaactgaaggaattgaagaaagtcaggttcaagatttatttaaagcctatttaaatatggcaccagcgcaagctttgaagtggtttgatagagatataaatccttcaaagcaaaatatagaaatagaaggtacagaaccttatatagttggaggacatggggcaagtggatattgggttgatactagaagaaaaacaactttagatgggctttatgctgctggagatgtttctggtggaagtcctaaaaaatatgttacagggtgttttgcagaaggtgagattgctgctgaaaatgcaatagagtacatttcaaataagcatttaaatacaattactgatgatgaaatagatgaaataatacatagaataaaagatttctttgatggaaaaagtgattttaagattgaacaaatagaagaagcaatgcagaaggttatggacgaatacgcgggaggtatatctcagcattataggtatactgaagaaaagcttaatatagcagagaaaagaatagaggagcttttaaaactttcatataagcttaaagctaagggttcacatgagcttttgtttatttttgagcttatagataggctttatgtagcaaaggttgttattgctcatcttaaggcaagacgtgaaaccagatggaaatgctatgaggaaaacgaaagctatacggctagagatgatgaaaattttcttaagtatgtaaactctatatataaggaaggtaaagtaaacatattatacagaaatcttgttggaaggaatgagatttatgagcattaaaatagatctaaacaaatgtgtaggatgtcaaaagtgtataaacatatgccctggaagcttaatagataaaaataatgatggtaaggcatatataaaatatcctaaagactgttggggatgtactgcatgtcttaaagaatgcaaatttaaagctataaagtattttttgggtgctgatataggtggtaatggttcctacatgtatgtaagtgaaaaaggtgaagaacttgagtggcatatgattaatgaggatggcaaggaaaagattattacgactagtaggaaggaatcaaataaatattaataagggagagggaagtgaagtgaaaaaaataaagatcggtgtcttgttaagtaccattatctttactataggtattttatcaggatgtgaaacaaaaagtgaaaagctgtcacaagttaaaatagcttattttggtaatataacacattcacaggcactgcttcaacgagacgatggttcacttcaaaaggcacttggaagcaatactaaaataaaatgggaaaagttcagcgctgggtcagccgaagttgaatctttactggcaggggaagtagatataggatacattggaccaggaccagctataaatgcatatacaaagtcaaatggagatatacaagttatagcaggagcagcagatgcaggagcaatacttgtttcaaaaaaaggtgcagacataaagagtgtaaaagatttaaagaataaaagagttgctataccgcagtatggaaatactcaagatttaactctcagaattcttctttatgaaaatggacttaaggatagagctaagggaggaaacgttgaaattgttgaagcagagaattcagatataaaaacgcttttgggtaagggttcaatagatgcagctttagttccagagccatggggcactaggcttgtaaatgaagttaaggcaaaggttgtacttaactatgaggatatatggagaaaaggacaatatccaacagctattgttgttgcaagaaaagaatttgtaaaagctcatcctgatatagtagagaaatttgttaaaaatcttgtagaggaaactaataaagtaaatagcaatagagataattctgaaaaggctataaatagacaacttaaagaaataactggaaaaggcttgtctaaaaagatattggattcatcctttgaaagaataaaggttacaaataatcctgaaaaagatgcagttttagatatggctaattggtcttttaaggcaggttttataaagagtaaagcagatcttaaggatatgttcaatttgagctttttaaatagggcgcttaaagagagtggaaaagccgaaataaagtaaaaaattaattattttgtgatcaaggaggatgaggatttgggaatagaaataaaaggtgtaagtaaggactttatatcaaaagaaaagaaagtacacactttagatgaagtaaatctttctataaaaaagggagagtttatatgtttacttggcccatcaggatgtgggaaatctaccttgcttaatataattgcaggtctagagaaaccaactaaagggattgtatatttaaataatatggagataaaagctcctggtcctgatagagcgtttatgtttcaagaatccgcacttttcccctggcttaaggtaatagacaatgttgaatttggcatgaaaataaaagatgtgccaaaagaagagagacgagaaaaagcacttaaataccttaaaatggttcacctcactaagtttcaaaactcatatgtacacgaactttcaggtggaatgagacaaagagtggctcttgctcgtgcgctaactttagattcagaagttcttttgatggatgagcctttttcggctcttgacagccaaacaaaaagcatactccagcttgaacttcagaatatatggtgggaaacaaagaaaacaatagtatttgtaactcataatgtggaagaagcagtgcttttggctgatagagtggttgtgatggcggcaaacccaggcagaataaaaaatatatttgaaataaagctagcaaggcctagggaagcgcaaagtgttgatttatcatatgttgctcgtgaagtaatgcgtgaccttaaagaggaggtggaaaaggttgcaaaaacggagtacgacagtgactggaattttcagaagagttctgttttatataattctgatagcgatttgggagctaatttataaagtttttgtagatatattaggtgtttggaaagcatataccttcccttctccaggggaagtgtataatgctcttgcttatcttgttaaggataatacgctttttatagctacaggagctagtctaacaagacttgttataggttatataatagctctatttataggaatagcattggcactagtgtgtattaagtacaaatatgtagatgaaaatttgactccccttatgcttggacttcaaacccttccgagtgtttgctggataccatttgcaatactttggtatggaatagatgaaagatcaataatatttgtcacagttgttgggtcattattttccatagcaatatctacaatatcaggagtaaaaaatgtgaatcccatatatgttaaagctgctaggaccatgggagcaagaggaaaaaatctttatttcgatgttgtaattccatcagcacttcctgaaattatatcaggtatgaggcaagggtggtcatttgcctggagagcattaatggctggtgaaatgctttcagcaacaaaaggtttagggcaggttttgacggcaggtagggaattgggtgatataagccaagttatggcagttatgattattatcattgcttttggccttatatttgacaaattgttatttgaaaaagttgaaaaaaatattagatataaatgtggtcttgaaaagaaaaattaaggaggattttaaatggatcatttagacagattagaagcagaaagtatttatattttaagagaggcttataagcattttggaaagcttggcatgttgtggtctataggaaaggactctacagtaatgctttggcttgcagagaaagctttctttggaaattgcccttttccacttatacatgtggatactacgcataaaattccagagatgattaaatttagagatgaagtagctaagaaatatgatttgaatttaattgttaatacaaattgggatgcacttaatgctggtatgggacctcataaaggaagacttgagtgctgtaaggctttaaaaaccgatgggcttcaacaagtagttgataaatataaatttgaaggacttatagttggagtaagaagagatgaagagggttctagatcaaaggaaagagtatttagtgagagaaactcggattcagaatgggattatacagatcaaccaccagaattatgggatcaatttaaaacggaatttaagaaaggaaaccatataagggtacatccccttctaggttggactgaacttgatatatgggagtacataagaagagagaatattccagtagttagtttgtatttttctaaaaatggaaagagatatagaagtcttggatgtgcgccatgtacatcaccaatagattcaaatgcttcaacgcttgatgagataattgaagaacttaaaaatacaaatgagacagaaagaagtggaagagcacaagataaagcagatccacacgcacttgagaaacttagaaaacacggatatatgtaggaggcgggagattatgagttcaagagaaaatttaaatgtagtatttgttggacatgtagatcatggtaagtctactttaataggaagacttctttatgatacaaattcacttccagatggagctatagaaaaggttaaaaagatttcagcagaggaaggaaagaaatttgaatatgcttttttactagatgcatttgaagaagagcagaggcaaggaataacaatagatataactatgattcagtttttcacaaagaaaagagattatgtcataattgatgctccaggtcataaggaatttcttaaaaacatgatatctggagcggcaagcgcagaggcagcaatattagtagtagatgccaaagaaggaatacaggagcagtccaagaggcatggatatatattatcactattaggtataaaaaaggtatatgtagctgtaaataaaatggatttagtggactattcagaagaaagatataatgaaatagttacacaatttaatagctttttagctaacttaaacatatacccagaggcatatattcctatatcagcttttcttggagataacgtggcaaaaaaatctgaaaaaatgccgtggtataaaggaaagagtattttagatactatggatagcgtagataaggagaaggggattgaaaataaggctttaagattccctattcaagatatatataaatttgataatagaagaattatagcaggaagaatagaatctggaactcttaaagaaggagatgaaatagtattctatccttcaggcaaaacaacaaaggttaaatctgtggagttttggcaagaaaaggacaagaagaagcaggtgtctgcaaaaatgtcggtaggtataacagtagaggatgagttctacaacaaaaggggagaaataatatgccataagaatgatggtgtaactgtctcaaatgcttttaatgcaaatgtattttggatgggaaaagaaccattagaaaagggaaagaaatataaacttaaaattgcaactcaggagatagaagctgaagttgaagaaataaaaaaggtaatagatgcagctactcttgaagaaataacaggtgcagatcatataaataaaaatgatgttgctgaaattgttataaagtcaaagaagccaatatgctttgatgcctttaatgataacgaagcacttggcagatttgtaattatagataactataatacaagtggcggtggaattatactaaaagggttagagacatatagagataataaagagataagaagccttgttacaaaagaagagagagaaaaaaagttcggtagttacggaaagatgattgtaataaatggagaaaacaaagaagtaaccgtgcagtttgcattaaagctagagagaaagctttttgatttaggacaaagggcatattatttggcttcagatgaaagcggaatagcagcagagattctaagagagaatggaataatagttatagtagcaaataaagaaaagtctgatgagtatatagaaattactgtagataaagatggtaaaataagtgataatattctaggtataatttaacaataatggctagcattaaatagatgctagccattatttttgcaagatttcagaaagcactatgcaacgttttggttgacaattaatatattaattaatataatattactatgttgataattggcgaataataatgttgctattttttaaaatcagtaattaacttgaattttgacgtgaaaattacaacaaaaaccaatttgagaagttaatgagtttatacattaacttttttatttgagatgatatattggttttaaagttaaacctaatttatgtatttaataagaattaaattgaaaaagtctcgatgtatacgtaaattaaaggcttagctatatataataaaacctacaataaattagtgaatataacttttgggggggtcaatttgaaaaagaaatttttagtattagttttagctataatgatgtgttttgcaatattattaacggggtgtgaaaatagtaacagtaatagtgataaaagcaagacttcaagtaaaaaatatacaatagcaacagatgcaacatatgctccattcgaatttaggacaggaagtgactaccaaggaatagatatagatattttgagtgccatagctaaaaaagagaactttacttatgacttaaaacctatgaatttcaatggtataataccagcacttcaatccaatcaagttgatggttctgtttctggaatgagcataaatgatgaaagaaagaaaactttagacttttcaaactcgtattacgattccggtctatgtgtagttgctaaatcagataataaaagcgttaaaacaataaatgacataaaaggaaagacggctgcacttaaaaagggaacagctggagctgcttatgcagaagcaaacaaggaaaaatacggattaacattaaaatacttcgatgatagtccttcaatgtttcaagcagttatgaatggtaatgcagatataactcttgaagattatcctgtaatagcttataaaatatcaatagataaaaattcaggcttgaaaatagttggagatgagaaaattacaacttctccttacggatttgcagttaagaagggtactaataaagaacttttaaagaagtttaatgatggtcttaagaaaataaaagcagatggcgagtatgataagattattagtaaatatataaagactggtaaagattcaaagaatgctaaagcttttaagccagaacaagataacttagttaagcagtatgcaccacagcttttaaagggtcttggtatgacattatttattacagttatagcaatgatcattgcacttttcattggagctatatttggattcttcagtataagcaccagcaaagtacttaatacacttgcaagatggtttgtagatataataagaggaacacctcttttagtacaagcatttttcatattcttcggaataccaggactttcaggtcttaaaataaatcctgtagttgcaggaattatagcggtaagcttaaatgcgggagcctatatgtctgagatctttagaggtggtatactttcaataaatcaagggcagatggaagcggcaagaagtttgggtataccatatagaactgctatgcttaaaatagtatttccacaagcagtaaaggtaatgataccttcaattgtaaatcagtttataatttcgcttaaagatacgtcaatattatctgttataggaatacaggaattaactaacacaggacagataataataggagctacctttaaggcgttccagatatggttaatagttgcgattatgtactttatagtaatcaagttattatctatcttatcaaggaagattgagaggtatgttaaaatatgagtaaggatttagcaatagaagttaaagaattaaaaaagagctatggttctaatgaagtattaaaagaaataaatcttacaattgatagaagtgaggttgtatgtataataggaccttcaggttcaggaaaaagtactcttttaagatgtatgaatagacttgaagaaataacagcaggacagttaatgattgatggaaaagatatatcagataaaaatattaacatagataaattaagagagaacgtaggaatggtgtttcagcattttaacctattcccgcacttaagcgttttaaaaaatataacctttgcaccaatagagttaaataaaatgtcaaaagaagaagctgaaaagacagcattcaagcttcttgataaggttggtcttaatgataaggcaaatacttatccagataagctttcaggaggtcaaaaacagagagttgctatagctagagctcttgctatgaatccagatataatgctttttgacgagcctacttcagccttagaccctgagatggttggagaggttcttggagtaatgaaggatcttgcaaaagaaggaatgacaatggttgttgttactcatgagatgggctttgcaagagaagtagcagacagagttatatttatggctgatggatatatcgttgaacaaggaacaccagatgatatatttaaaaatccaactcaagatagaacaaaagattttttaaataaagtattatagataaaaaattgttggtaacttaaaacacctttataattggcgagaaagcttattttaagggtgttttgttatatagcgtcagtatggtataatttattttatcgatagtaatggaggtatttaaatttgtttgcaagagaaagatacgatactattctcaacattttaaacagagaaggaaaagtaattgtaaaagatttgagctcaaaattcaatgttacagaggactgcataaggaaagatcttagatacttggagaataataatttcctaaaaagaacatatggtggagcaatacccataagaaagactgctcactacaataaaataagtgatagaagaaatgcgaatgtgaaagaaaagttaataatagcaaagaaggcatttgatttaatagaggatgatgagacaatatttttggatatatcaactaccaatataatgttagctgaatttctatctaaaagtgataagaaggtaacggttattaccaacatgatagatataatctctgtattaaacatggaaaataatataaaggtaatatctacaggaggtgttctctctaaagatttgaacggttatgcatgctcaatgactatagatgttatatctaattataaatttaataaggcatttataggaagctgtggtgttgatttatatgataatagtgtcactaccttcgaagtagaggacggaaatactaagaaggctataatgagaaatagtaaagtagtatatctagttatggataatagcaaattttattttggaggaacatataaattcgcacattttgaagatatagatgttatcataactgataaggttccaagtgagcaaatactggggataatgaagaagaatgatgtagatattatatagaaaaatatgaagctaaagaggggtaaagtatgatattttttggacacttaggattaacaactggagccgtaaagatatgtgaaaatactgtcttatcaaagaaaaaagatattgattatagatttttgcttgttggctctatacttccggatcttattgataaacctataggagcattttttttcagaaatgtatttcataatagcagaatattcgggcatacactgttgttttcagctgtactgctttgcattggattatacaggcaattaagacacaaaaaaaatgggattttgatgcttggaataggtagcgctattcaccttattcttgatagtatgtggctatacggaagaatattattttggccattcttaggcgctacatttcctacaagacctgaaggacattggcttaatgagggaattttaagactgttatcagatccagtttacttttcttcggaaataataggctttgttattataatgtactattttataaaacttattaaaagaggaaagttaagaaactttataaaaaatgggcaattatagaaaaactattgacaagggtaaccataagtagtatattaaaactgtactatttaggtatacttttgaacaggagaaggatatgagaataacacaagaagcagactatagtatgagagttgtgctatacctatctaagcttgggtatgaacaaaagatagatgcagcaactattgcagaacatgaaaagttacctctaagatttttacttaaacttttaaggaaacttataaaaagtggcattgtaaaatcttataggggtgtaaagggtggttatgcgttaaataagtacccgaaggatattaatctaagagaggtaatagaagcgatagatggacccatatgtgtcaataggtgcttaacagattcgtcttattgtaatgcaaagcgtacaggtatttgtgaaatacataatgctctctctttagttagaagtgacttaattaaaaaccttgaaaagataaattttgaagatttgaaagatggaaagcggtaataatcagggacttaatttataaaaagtccctttctataaaacataaactatacctaaaaggtatactttaaggaggattttataatgagtgaatgtcaaaattgtcatgtttgcgatgatgcagacaaaactcttcgtgattttatatgtgggttaaataatgttgaaacgtcagaacatagagtggaaagtcaaaagaataaatgtaagtttggtaaagatggtgtctgttgtaagctttgtgctaatggaccatgtagaataacaccaaagtcaccaagaggtatttgtggtgcagatgctgacactatagtagctagaaactttttaagagcagttgcagcaggaacagcatgctatgttcacgttgtggagactactgctagaaacttaaaggctttaggagaaaacaagaagcctataaaaggaatgtatactcttaataagctagcaaatatgtttaaaatagatgaaaaagatgatcacaaaaaagcagttatgatagcagatagagtactttctgatttatataaaccaagatttgaaaaagcagaattagtaagcgaaatagcatatgcaccaagattaaaaaaatggcaggaacttaatatacttccaggaggagcaaaatcagaagtatttgatgctatagtaaaaacttcaacaaatttaaatagtgatcctgtagatatgactgtaaattgtcttactcttggaatatcaacaggactatatggtcttactttaactaacttattaaatgatgttatacttggtgaaccagtaataagacaggcaaatgttggtttcaaggtagtagatccggattatataaatataatgataacaggacatcaacattcagtaatagaacatcttcaagaaagattaatagatgaagatattactaagaaagctcaggctataggagctaaaggatttaaattagtgggatgtacatgtgttggtcaagatcttcaactaagaggagaacattataaggaagtattttcaggtcatgcaggaaataactttacaagtgaagctttaattgcaacaggtggaatagaccttattatgtcagagtttaactgtactcttccaggtatagaacctattgccgaagaatttgaagttaaaatgatttgtgttgatgatgttgctaaaaagaaaaatgctgattttataaagtatagttatgaagagagagaaaatataactgatagtataatagaagaagctcttaagagttatgaaaatagaagaaaagatgtaacaattaatatacctaaagatcatggatatgatgatgttgtaactggagtcagtgaaaaatctcttaaagattttcttggaggcacttggaagccacttgtagatttgattgcatctggcaaaatcaaaggtgttgctggagtagtaggatgttctaaccttacagcaaaaggtcatgatgtatttacagtagaacttacaaaagaacttataaaaaggaatataatagttctttcagcaggatgctccagtggtggacttgaaaatgtagggcttatgtctccttcagcagctgatcttgcaggagatagtctaaaagaagtatgtaaatctcttggtattcccccagtacttaattttggaccatgccttgctataggaagacttgagattgttgctacagaacttgctgaatacttaggaatagatataccacaacttcctctagtactttctgcaccacaatggttagaagaacaagcattagctgatggagcttttggactttcattaggacttcctcttcatcttgcaatttcaccatttatagatggaagtgctgttgtttctaagcttctaaaagaggatcttactgatattacaggaggtaagcttataatagaagaagatgtaataaaagcagcagataagcttgagagggaaattattgatagaagagaaaaattagggcttaattagattttcaataagttaaagagctaacgataaagttggctctttacttttttttatagcattaaataaattggcgaaaaaagaaaaagatacaataaaatatatgtaaacaactaagtatatcattcgataattataataatgttcaattatttgtttgaaaaagtcaaaaaatatattataatgtacaattttgtatgtttatataaagcaatcataaggaggcattagcgtgggagaaaaagttctaattgttgatgatgcagcttttataagaaggacgcttaaaatgatgcttgaagccaatggttttgaagttgttgatgaagctgaaaatgggattattgggcttgcaaaatacaaagagcataatccgtcaatagtcactatggatattactatggatggtatggatggaattgaggctttaaaagctatacttaaatatgatccaaaagcaaaagttgtaatgataacggctatgggccaggaaagtatggttaagagggctataataagtggagcaaaatcatttattgtaaaaccttttaaacaagaacaattgattgaaactattaataaggtgttagctgtctaaaactttgttaggtggtgatttaatgtcacaggaatctttaaatgattcaatgttagagacgtatatgattgagacttcaggaatggtagatgatctggaaaatataatacttcaaaatgaagaagaaaagtgttacacggatgaagtaatcaataaaattttcagaatagttcataccgttaaaggctcatctgctatgatgagttttaatggtattgcggaattgtctcattccctagaggatattttctattttataagggaagaaaaaagccaaagtgtaagatgttcaaatatttcagatttgatcttagataatgttgattttataaagaaggaactagataaaattaaaaataaagaggaggctaatggagaccctagtgaattaattgctaataataaaaaattctttgattcattgaaaaagcaggaattttataaaggtattgtatttttccagaaggattgcggtatggaaaatataagggcatatacagctgttgaaactttaaaaacgatttcaaatgacatctgttattttccggagaatattttagaagatgacgatacctgcaatacaataaaggaatctggatttaaggtgtttctaaaatcagataaatcgagagaagaaattaataaggtttttgaagccatagtgcttttagaaaattttaaaatttctgaaataacagaaaatgaatacgtttctataacagaaaaagataaaaatagagatattaataaaattccagtgaaagaggaaaagaaggagaacataaccagcagtgccccaagcgtgataaatgttaatgtaaataaagtggataagctcatggatttacttggtgaacttgttattacagaggctatggttattcaaaatccagacttaagaggacttgaaattactaattttagtaaggcggctacacaactgcataaagttataaaagaacttcaagacacagtaatggatataagaatggttcccctagcaaatgtgtttgcaaaaatgaaaagaattgtaagagacatgagcaaaaaacttgataaagatgtggaacttaagcttataggagaagaaactgaggtagataaaaatataattgagcacatagcggatcctttaatgcacttagtgcgtaattcgatagatcacggaatagaagatagagagcagaggaagagatgtggaaaaactgaaaaaggtttagtagtcttggaagcaaaaaacttaggtagtgatgtagtcataagaattaaagatgacggtggtggactcgataaaaataagattttacaaaaggctaaagaaaaaggcttgataggagaaaacgaaattgtttctgatgaaaagacatgtagccttatattagaaccaggattttccaccaataatgaagttacagaatttagtggaaggggagttggaatggatgttgtctccagaaacatcggagatatgggaggaaggataaatgtaagtagttcagaaggtaagggaactactataatccttaaaatacctcttactttagcaataatagatggtataaatgttaaagttggtaaatcctattacaccatacctacattagatataaaggaattttttaaacctgattcaagtaaaatactatctaatatggatggcagcgagatgattactataagaggaaggtgttatcctgtaataagaattcatgaaacttataatctcaaaacatcagtaaagaatatctcagatggaatactcataatggttgaaaagaacaacaaaatgacctgtattttcgcagatgaaattgttggacagcagcaggttgtaataaaatcacttcctgagtatataaaaaataataataacgtaaaaggactatcaggatgtaccttactaggagatggaaatataagtttaatattagatgttggtgagtttataaatgcttccttaaagaaggtataagcatttcattataaaaaattcagcttgatttttagtggagaggagatggagaaatgtctgaattcgaggggaacattataaatgaggaagacacacaaaatggcaagtttttaatttttattactgacggagagcagtatggtatagaaattaaacatgtaattgaaataataggaataagccctattagtgagatccctgaattgcctcaatatataatgggagttattaaccttagaggaaaggttatacctgtaatcgatataagacttagatttaataaaattttcaaggagtataatgatagaacatgtatagtaataatagatgttcaggacatgttgattggcattatagttgataaggttctggaggtattgaaaataagcgagaatgagataatggatcctccagagataagtaaggataaaaatggatatatcaaagccattggaaaaacccacgatggtatgaattttatattagactgtggaaaattaattagctctgaggaaataaataaactgggaccaaaaaacaaaattagggaggataaatagatgagatggtatgatgatatgaagattagttccaaaattttagttggttttgttgttataatatttatttctgcagtttcaggtgtttttggaattttgaatttaaataaggttaataattcaaacacggagacctacgagaaaatgttagtacctacaggagaattggtttcaatatcaaatgattttggaactatgcgtgcaagagttagagatgttgtaatagaaactcaaatggataaaatggataagttttcaagtgattttaatgcagcaagtagcgattttgataaagtattggaatcattttcgcaaactattttaactgcagatggaaagactattttaagtgaaataaaggatgctaagaaagaatatgtacaatatgctcagcaggcaatggaattaagcaaacaaaataaaaatgtagaagctatggctatagttagaaatcagcttacagtagcacatgataaacttgcaacttctataaaaaatgttacagatatgaaaaaagaattagctaaagagtccacagatcaaaattctgcaacagccaagacatcaattattgaaacaatcattcttgtgattttaggggctggacttggtgtagctatggctgttttaacatctcgttcaataggaaatcctatgaaaaagataactgaggtatctgaaaaaatagcagatggtgaattagatgttgagcttaaaactgacagaaaagatgaaattggggttcttatgaatacctttaataaaatggtttctaaccttaacctagttatgtccagcatgaatacggctgcagatcaggtcgctattggttctaagcaagtatctgattcaagtataatgctttctcaaggttcttcagatcaagctagtgctgtagaagaattgacttcatcaatggaagaaatagcttcacaaacaaaggtaaatgctaataatgcaactgaagctagtgaacttggtaatgaagttaaaagtaatgctgaaaaaggcaataatcaaatgaagcaaatgttaaatagcatggatgatataaatgctgcatcaaagaatatatcaaaaataataaaagttatagatgacattgctttccagacaaatattctttcattaaacgcagcagttgaggcagcaagagctggccaatatggaaagggctttgcagttgttgcagaagaggttagaaatttagcagctaaatcagctaatgcagcaagagaaacaacagaaatgatagaaaactccattagaaaagtagaaactggaactgagtttgctaaagaaacagcagctgcacttgatgaaatagttcaaggaatatctaaatcagcacaattactggataacatagcaagttcatctaatgagcaagcaatcgcaattgatcaaataaataagggaatagtacaagtatctagcgttgttcaagataattcagcaacttcagaggaaacagcagcagctagtgaagaacttgcaagccaagctagtcttcttaagaatgaaatttcaaagtttaagctaaaaggaaaaggtggatttaattatggcgaaaactatggaatggagcatgcagcaactaaaggtggctcaaaaacatatgaaatgtctaatatggatatgtacggaagcgactttggaaaatattaatgagaattctaaacgaaacacaatttaaggagatttctgattatataaggaggaactttggaatcaacttaaaaagtagcgacagacatatatttgcaaacaaatttgataaatttttaaatatcataaaagcaaatagttttgaagagggctatcatagaatattgaatgataggacaggggaatgtgtaaggatatttcttgatattataactataaatcatacattttttatgagagagcctgaacatttttattattttagagatgaagttcttccttatcttaaaagtacaattaaggataatgatcttagaatatggtgtgctgcatgttcttctggagaagaagcatatacaattgctatgatattagatgaattttttatgagagacgattccctttgggaaagacaagttttagcaacagatatatcctgtaaggttcttaataaagctgtaagaggtgtatatagtgctaaagaaatacaagacgttatgattaattggaagattaattatttcaaaaaaatagacagtaataactttgaggtgagaaaggagattaaggataatataatttatagaagatttaatcttatggaagaagtgtttccgttcaagaaaaagtttcatgttatattctgtagaaatgttatgatgtattttgataaatatactaagaagagattaataaaaaaattctatgataatactgaaaagggtggatatttatttataggacattccgaggggattgatatagaagatataggatataagtatgttatgccagctgtatatagaaaataatacaatagagcattgcaaattttgcagtgctctattgtattataaaaaagtatgttgaaaaaaaatacattatagtatatgctaacaatataaaattagtttaaaaattgtaattatggtgattaaaaggtattgaattaaaaaggagattgaggttatgaaaaaaacagtacttatcattgatgattctgcacttgctcgcaggactgtcaagaatttacttgaaaatgatggcttcgaggtggttggagaagttgaaggtggacctaacgcaattaatcaatttaaagaattgaagccggagattgttacaatggatgtttcaatggataagatggatggatttaaagctttaaatgatattttaaattataatccagaggctaaggtggtagttataactagtatggcacaagaagatgctgttaaaaggtcggttgaattaggtgcaaaatattttattgccaagccgtttgaaggaactgaactagtcgaaataatagaaaaggtattaaataatcaagtttttgagcattaactataaattagggttttatagttaacttgattaatagagagattagattttataattaataagggaacagttatagttatatacatatatactgttaagattttcattttgaaatatgtacaaattaagtttaactataaaacccttaatacaagaaaaataagcttgtggtgatgttggaaaatgaaaaatgaatttttaaatgaagcaataaaggaagctaagcttgcaaaaaaagaaggagaagtgcctgttggagctgttattgtgaaggacaataagattatagcaacttcgcataatcttaaagaaagccttaagaatccatcagcacacgcggagattattgcaattgaaagagcggcaaaatatttaaataattggagacttaatggatgtgagatgtatgttaccttagagccgtgccctatgtgtgcagcttgtatatgccaaagtagaattagtaaggtatacgtaggcacttttgatccaatatcaggagcctgtggttctgtagtgaatataactgaaaatgattatttaagatatcatacagaagtagaatggctatattctaatgaatgcagcgatattctaaaaggctttttcaaagctagacgcgtttgatttttataactaagtttagtataatgttttagtgttatggagagatgtcggagtggtctatcgtgcatgactcgaaatcatgtgtacggtttaacccgtaccgagggttcaaatccctctctctccgccaaagttagggactttagcagtttgtgctagagtccctttttagtatttacatattaaaactatatttagagcctcttattttaataaatgcctttaattacaaaaaacgagccgcgaactgttccagctaatttagatttttgtctagcaaatttgaagttgccttctaactcttttggtatttccatgccctcagatagtttaaaaccaacagctcgttttttaggattatcaactgtatacataacgttcaccacgagaccattttcgtaaaagatgtaggcaaatttgatattttctatttgaaaatgcgacgtctctaggggtttagctgaaaattcaatattacgttctttttttaaaatttgatttacataattaatagtatcattgctttcggtgacaggtacaactgtaaacttatgtttgtatttattcataaaataacgggcttcattagcacgtaaaccagcaagtgaatttaccacaggtgaggaatctaaacccacggtagaaatatttttaaaatcaactatatatgacattttcagcctccttttataattttatttattgataaatcaatagtagtgttctcatattaataaatagtaacctaaataagcaataagtataatttataataattcccaatattttaagtggattaattaaaagagcagtatttttattgggattaatagcaataaataacagcaaaaaatgtctaaaatagttgtatagagtcatatgctgaaatgaatattctaaagtatttcaaaaaaatgtaataaaaacaacaaaaaaaagaacaaaaattaaaaaaatgttgaatattatattaaaacatgttattataaatatgtaaggtatagtaagggatatatgaaatttatggtcaaaattagggtgtttttatagagagatggtattgagatatatggggaaaagtatttatatagaatttaagttttatcactactatacctttcctgtatgtaaaaacgttgaataacatgtaaaatttctttaagattgaaaaagtatcttaatttttttttctctaaagtagttgaaattgttcataactaatagtataatatgattgctgtgttagactaataacacacaaattaattataaataatatggagagatgtccgagtggtttaaggagcacgcctggaacgcgtgtgtaggggaaactctaccgagggttcgaatccctctttctccgccatttaatctttgctgtgctagacggggagttagcggtgccttgtacctgcaatccgctgtagcagggttgaattccttgtttgaggctataatttgtggggtttgcctcatcttggtcaatgttgagaattgggtcccacgcaacggaaattcatgaactccgtcaggtccggaaggaagcagcggtaagtgaaatcttccgtgtgccgtggataaatctgatttgagttgaccaggtgagtaacactcatagattattgtcgattcaaggtgcacagctttaaaaattataaagaatttacaaagatgctttgctaggcatctttttttgtagtaagatatagttatgtaaaactaagtctaatggggattttaaaatctatataaagaaggtgtttttttggcatatactgcattgtacagggaatggagacctaagacatttggtgaggttgttggtcaggaacatgtcacaacgacccttaagaatcaagtaaaaaacaatagaatagcacatgcatatctcatgtgtggtacaagaggaacgggaaagactaccacagctaagattctgtcaaaggcagtaaattgtctcaatcctcaagatggtgaaccatgtaatgagtgtgagatgtgcaaaaaaataaatgctggaattgcaatagatgttacagaactcgatgcggcttcaaataacagtgtagatgatataaggaatattattgatgacgtgcaatatcctccacatgagtcgaaatttaaagtctacataatagatgaggtacacatgctttctcaaggagctgttaatgcttttcttaaaacccttgaagagccccctcaaaatgtggtttttatactggcaaccacagatccgcaaaagcttccagtaactatactttctagatgtcaaagatttgattttaaaagaataaaaagagaaagtatgataggaaggttacgggaaattgtaaatgaaaaaggtgtttttgcagatgatagaagtctaggtgtcatagcaagaatgtcagatggtgctttaagagatgctgttagtatattagaccaagctatagcagaaggaaatggtaaagtagattatgaaaaggttcttcaaatgcttggcattgtaactaatgagtatatatttgacctaatggaccatgttattaataaggatatagaaggttctataaaaatagtagataaaattattcttcagggaaaagaaattacagtattcatgaaagatttcatagcacatgttagaaatcttatggtagtgaaggtaagtaaaaagccagaagaagttatagatatgtctgaagaaaacttaaaaacccttaaagagcagtcttctaagatcagaatagaagaaactatgagggatataaatatacttcaggaggccgaagaaaaagctaggaaaagcatgaattcaagaatttacatggaaatggctataattaaaatgtgcaaaatagaatacgatacttcaagtgaaatattactggcaaggataaataagctagaaacaattattagagaaggaaagatatcggttcaaaaggtagaagcgaaacaaaagccttcaagtagtcagaaggttccaaggcttactgtaaataaagcagaggaacatgacgaggcgaaacctgaagaggaattttcaagtgatttaaatataagtcttgatgatgttagaaagatatggcgagatgtaatagaaatgtttaaatcaagaagaaatatggtcatgggagttcatttaagtaatggagttccgttctcctgtaaagacggagttattgaggtaagattcacaaaagagtataatttcagtaagcagcaccttgaaaaaccacaaaataataaaaaagtcgaagaggttctacaagatatgcttcatggaagagttagagttatatattctcttgaaaagggtgatggtacaactaatcaaggtagcacagaggatatactaaagaaaacttttggtgaagaagagcttcatattattgatgaatgatttaggaaatgataaaatattatgtacggagttgaaacgttagaaattaaaactctataaaaagaaaaataatttgattcatataggaggtttttattatggcaaaaggtggattcccaggaatgggcggaggaaatatgaataaccttataaagcaagctcaaaaattccaaaagcaaatggaagatatgcaaaaagaaattgaaaacaaagaatttacagcaacagttggaggcggtgcggtaagcgcaactgtttcaggcaaaaaagaaataactgaaataaagataaaaccagaagttgtagatccagatgatgttgaaatgcttcaagatttaattttaagtgcatgtaatgaagctcttaaaaaggctgaggaagagacatcaggagaaatgaagaagttaacaggtggattaaatatacctggcttataaaattaaaattatatatcaagatatgaagtgtatttgggcttttttattcataaagcccttatatgattttataatagacgaggtgaatacacatggaattctatcctgtggcaattgagaaattaatagaagaatttgcaaaactgccaggtgtcggatataaaacagcacaaaggcttacaatgcatgttttaaatctaccaaaggaagaggttgaaggttttgcagatgcactaaaaaaggcaagaggaactataaaatactgttctgtttgtggtaattatacagatactgatccgtgtgcaatttgttctaatcctaacagagataagagtcttgtttgtgttgttgaagagccaaaggatataatatctatggaaaaggtaagagaattcaatggtgtttaccatgttcttcatggagtaatatctccaatgcttggaaaaggtccagattctataaaacttagagaacttgttagtaggatgaatggaaaagttaaggaagttattgttgcaaccaatcctaatgtagatggagaggctacagctatgtatatatcaaaaatcttaaaaccgcttggagttaaagttactagaatagctcatggtattccggttggaggagaccttgagtatgcagatgaggtgactctagctaaagcgcttgaaggaagaagagaaatataggaatataattcccaatttatggctataatttaatgagacataaattgggaggttttttatatgaaaaagaatatgtcagataaaggcagcggcttccaagttgatgtacaaagtctcattcttgaaatagagcaggcaaggagagaaatgcagaattgcatgaattattttcaaaatgtaggtaatgaacctaacttaatagattatgctatatacaaagaggctgctgcgagagctaagtatatgtatcttttgacaaaggctagaaaattaaacgtaaaggtcaatagatatgattttaataaaaaaatgagctcttagtaaatttatgaggggtgggggtattttggattatataggatactttcttgtggccataattgtaatatttgttgtagttaaacttctagaatggccaattaagatgcttgtaaagttaattataaatggcgtaataggagcaataatgctatttgcgttaaatatttttggaaaatacataggaataagtattggtataaatatagttactgcgcttatagccgggattttcggaattccaggagttatattcttggttatattaaagttcattatgtaaggaataaaaaagccaaatgggtacattgtacctatttggctttgtctttttaaagaaatagctgatacatagccaggagaataattactattccagagataagttcgccgtaatctccaaataatttataaaaatatttgcttccaacggtgtaaccgagaggaatagagattatgctaaaaacgaatatggatattgcagcttcatacatattaatacctaacatgcttgcacctgctccaatacctatgttgtttagtgatagtgcaagacccaaagttatagattcttttatgtcaatttgtcctgaattgtccacatcagctttttcaggattatctaaaatactcttttgatcaccagggtttcctttcttgattttaattctttttacgaaaaagcttattatatagtataaacccattatcgatagaattaagcttccaaatatatttgaaatggattttggtagaaagtagtacagaaacttccccagaaccatagaaatcaatgttaaaagaaaagacataaaagctattacaaagttaattaaaaatgttatttttacttttcgtattccatacgcaacaccaacaataaagttatcaatgttgattataattgcgaataatactatttcaagaatattcataaccacctcataagatagtgcttcgtaatattatactcaatatgcttataaggtgttacctgtaagaggtataaagcttaagtctatttaatgaggggagtatatttcaatgaattaatagttattttagctcattaataatttttgtaataccagtagtcactatttttcctatttcattagcatatgatgaattaggatctttttgagcatcaagctttttcttaaaattgcctttaatcattattcttatgcctataactttttcttcagtttcagaattaactaattcatcctgaataattgggcattttcttcataattgtgtcaagtattttttttatatcgccatctataacaatagtaacgcctattacttcttcatttgtattcgaatcaataaaaatctcctctaataattgtaaagcctttttcataaattatttcctccaatatatcatgttagtaggtattattttcttcaagatcttctgttaatatatcaaatcttattagatcatttttagtaagatttatttcatatactgtttttatagtaatttattttatcagaagtattttacttatctatattattgataaattccaatgcttttcacaaagtatgtttattcttaatacttcagaccacataccttctggttttcccataccctcccattcgaaataactctttaaatcagccttattggatattaatgaatttttaagcttactaagtattttagctttattaattctaaatggtgctgagccaaatgattcctctattaattgagaatagatagttgataatgcacagtatatatcaactatacctccatccatcatttttaacagcgtttcttctaataatttatcaattttaacactcggattttctttatatatttcatatattccttttgctaaaatgcttccgacatctgttggaacatgtgcaccaacccattggtgtaactccactttatatgatcctgttccttctaataaataaataaattcattattatttactgcatttattgttttcgttttaatatctatatctaattactccttactttaagaatgtaatatttacaaaatcattattattaattatcgattatactatttcaccatcgataattctcttagtctttcatacattaaacacaggtgataaagattatattggtaataaacttgtatcttttaattaagctgtatatcatttactacccaggaagtacaaaatatggtctacacttaatgttttttttaggtatccttttttaatgcaattgggatacatcttgattttgtttgaccaatagtttttaaatattcgtttccggagccgtctatatactcagtgtgccacccatgactatcttgaaaaatacaaatagaattatattttttactagtataacttatatacgatttgtcaattcctattttatttaacgctaattctaaatcttcttcgtttgatacatctcttttggctgataaaatatatttatctaaataatacgactctaatctatttaacaaaaaatgtagacatgcttcctcttcattattatattcacctaacagttttatctcttttcttctctcattatttatgtggtaaaaaaaccacttaccattacctttttctattttatagtaatcatcttctggataggacattttttcttttaattcatctttagtaacaattaattccttattgtagtcttcgtcttttaatatttttacaacatcataaatattcatttttcccactgtattttagctacttcgctcacgattatcacagaacactatatgaactctatatttaaattaattcattttactaagattcaaatgttgttttattaggaaagttgccctcttctttgatgaaacatctagctaatcgttgggctgccctattaaaataaaattgtggtgattgtaatgaatcttgaacagattccagttcgttaaacatctttgttttcttagtaagctctatctttcccatcactttctcattaggaccaaatttatatactactctagcatcatcttcaaagtctttaattagtaacagaaatgacgccattttactacctcctttgatttaaacaactcatgattttataagtgaatatcattttgctcatagcttccattacttagcctattccaagattgtactatatcatagtatggattaaactgacttacatcatcttacaaaataagttctttattaaatacatggtattttattccttaaacttgttattctgacatattacaagttccagtggatataggcacgcacccgtatcacatagatatatcttcgatattttcaataacctcatttattctatttatgctagcggtgcccctaggttctggttccagaatttacttaagtattatataatttttacacaatgaattaatataagaataattatttgatttttgttttttcttcagtaattactatatctttttttaataccttaccttgatgatagtatttatcacaacgttctaatcctaatttttttgcaatctctaagctgcttgtaccaactatataacaatcttctaattcattttctacattaacttccaagttttctattttgcccaatgtatgaattttataaagttcttcaatttgttttttatcaacatttttgctatatactccactattatattcatctataaatgatgaatctatcttagttttgtcttccgtaattattaaagtgttgccatctagatcactatttatttcatattcaatattattatatatgcaataatatccatttcttatcattaatctattgttctccaatctttttataactttatgtaattcactacctttaacgggtgttactctattatttaatatccactgttgcctttgttttaaatttaatatatccatatgtattagcactttttggatagggcctatttttatctgcagtaacataatctagtcttgatgattcaacaacatcattataatttttgatgtgtgacacattaccatactttgctacgtaattaccaatttgacaaataaccttcaatatcacttttaggaatagttttttgaataaatgtattcttgtcaattttaggtattgcatctctaatggctttcattgtttctatttgttttggtgacaattcactaggattagttaaacgcaatttattaaattcatcaatatttaatccgtttttattaattatattggatgttactttaagattattattaacagctttactcgaacaattactctttcctatattaacaactacaggcctctcttcgctattttccataacttcatttattctatccatgctagcgagacctctagctcctgtttcaagctcattttgaagttcagctacagcattttggttactaaaagccatttctgttaactgtgcatcaattacttcttcaccttgagttctaactctaggcttttttccggtaacccagtactctattttatcaaagatatcttcctttgcaggcttattccaccaagcatttttttctattttttcctcgttatctagttcctttaaaagattgtcagcttcctttaaagttttatcagtttcttttaatgtttcatctatattctcgtcatcattacctctatataatatactagcacaagttaatcccattgcacttgctaaatttttatcagcatttgcaagggtaattctcgctttatggagcttattggataatttatatagataattttgtaataatatggattgttggttgtatatttgtaattagaataattttttaagaagtagagggaaagaaatatcagttgttggttcaacaatttttatagccattgaaacatcacttatatccgtaaaaattattcattaaaaaattttaactaagatgctattgtaataataaagctattgttatattatatatataacaatagctttatttattgaaattaaggaaaaattaagaaataagtaaatattactttatctttatggtttattatatattttggttgatgaagtgatatttcatgtataagaaataaggaggttaaagcatgggagtagtccttgaggttaaagacgtaaagaagcacattgggaagagagaaataataaagggaattagcttctctgtagaagaagggcaaatttttggattccttggacctaatggcgctggtaaaactaccactataagaatgttggtgggacttataaagcctaattctggtagtataaaaataatgggacatgatattcaaaaagaaaaagagaaagctcttagtaatgtgggatgtatagttgaaaatcctgatatgtatggttttttaactggaagagaaaatcttattcaatacgcaaaaatgtatggaagtgttagcaaggaaagaatagatgaggtagcagagataataggtcttaaagatagaattaatgataaggtaaaaaaatactcacttggaatgaaacagagacttgggttaggtcaagcacttttagtaagacctaagcttctgattctagatgagcctacaaatggacttgatcctgttggaataatggattttagaagaatagtaaggcttatggctgaggaaaataagtctgcagtttttatttcctcacatatacttgcagaaatacagcaggtatgtgatactgttgcatttataaatggaggagaaataaagtctgttgagagtacaaaggaaagcgaaggcaagggaactaaggagaactttggaatagcaactagtaatattaatttagctatggaaacattgtcaaagctgccatttgtatatgaggttaaaaataatgaggacaagatttcagcagctatacaatacggtacgtctccgaaggtaatagcagagcttatgaaaaatagcgttgaagttattgaattttataaagagcacaagacccttgaagatagatttatgcagatagtagaaggggaggaggagaaagatgtggcctctaataagtaatgagctttataaaataataaaaaagaaaaagttttggataacctttatagtcttttttgctttattcttagcttattctattgtccaatattcaagtgaaaagaagtactatgaaccaaaacagagaatagcaatggataaactagaaataaaaactgaaaaaaagcaattaaatagcccagggattaatgccgagcagaagaaaaagataaaacaatacattaagcaagatgagaaagatataaaggataaaaaaaaggaagatgcaagcaaagacttagattggcatttaaggcttaataaagaactgatacaaaaaaaatatgaatatataaaagataaaggcaaagggaagaatgaagatactgaagatgcaagtataagtgtcatgaaggatgaatattacagagataataatttaaatccatatgataaaactggagatcttgcaatggattcttttcttagttcaaaggcatttatgcagattttagtggtatttattataattgcagtggcaacgtcagatatagtaagttcggaatattctcctgctactataaaaatgcttttagcaaaacctgcgtctagggcaaaaatacttttttctaaatttattgcaatattagttggaaatatatttatcataggaatccctcaagtaataacatatttaattttatcgtttatgaatggtttcccaaatttatcgcaaccaattgctgtaggtagaatgtaccaatatgattcttctgttattctttccaatcataatgttggtgtttcaccaatacttggatcatcttatcttataacagagggtaagtatctattgtatcttgcattattggatttactatttatattaggctgcgtttctatatgttttttaatttctgtactaataaagaactcagctataacaataggaataaatgtagggttaggagttgttatgtcaataataggtttaatgacactagaaggagctatacctaaggcattgtcagctataacaccatttcttataatgacctattcgtctacggatgtacttttaatgggtgatatggctaaaagggcaaacaatcctgggataactgtgggcatgggcatagtggtgtttattgtttatacggtagtatgcatgggaatttcaacctttgtgttttctaaaaaagatatgcttgcttaaattttaagagaggaggggataatttgtatagacttataacaaatgagctccaaaaaatatttaaaagacgaaaagttttagttgtgagtatagtgtttatagctataatattatttttttcactggttcagtataaagaatctcataagacaccagttcaaactatagtacaaaatgaaaagtatatatctgtatataaagaggaaatggcatacttagatgcagatacacaaaaaagagttaaggagaatattgctcaatacaaaaatgagatacaagaagcttatcgagcagaagatttggataagcttaattggaaggatagaataaaatatcagataagtgacgatgaaaagaagaaaaagctgccagatatagtttcagatgataccaaaatagagcaagtgaatgcacaaatactatctaaaaaatatgcacttaaaaatagtgtgcctgatgcagcagatgattataatgaaaaggctttagatgtattcataaaaatggtatcatacgtttctcttataattctacctgttataatatgtgtaatagttcttgatgttgtttcgggagaatgcagtccacctactatgaagatgctcttgaccaagcctttttctagagggaagatattattttctaaatttatggcggcatctattgcgagtataatagccatagttttttctgaattaatatcgcttataatacttggaattgtaataggttttggaagcattaatgcacctgtaagtcttggtactaaatatcaatttaatgcagataaagtgcttgcggggaattggcatgatgtaaaggctattattggaagcacttatgtagaacctcagtggaaggtcatgcttgagatgtttgggcttgaaatactttttatattggcatttacaagtatatgtattcttatatcggtattagttaatagcaatacggtatctatgacctcaggaataattattgcagttattatgagttttatagtgcttaagataatggctggagatggtagtagtgccggtgatgtaccatttagaaaaatagcaccttatttaataaatacttatagttctccgggatttctcttaagtggagatatgacatcacaaataaggaatcctgatatttcagtgggacttggagtattagttaatgtgattactggagctgtgtgttatataattgctcatattaggtttacaagaaaagatatgttagtataaataaaattggaagagaggaattttagttatgaataagagtaaattggctattgcagccgttcttgtatgtgctacatcattatcagtaggatgtggggggagtagtgcatcaactaatggtaaggcaaatggtaagaaggatgctaatgcaatacaggtaactggaaccgtaaaatctaaaaatatagaaagtatatcacttggattgccggaaacagtttctataggagtaacaggtgttgatgttaaattaggacaagaagttagaaagaatgataaattagtagatttagatttgagtgattacaattcaaatatagataaaatacagaatgaaattgatgctgaaaatataaaaaaggataaaatgacagatcaagatcaaaaggatatggaacagaagacgattgatggatataatgatgagattacttctataaaaagcaaattaaataaaacttatgttaatggaagctcgataatatgtgatatggatgatgcggcagttactagcattggatactcaaagggagatatactaaattcacaagagaaaattgttactctggaagatttaaagaatcttcaggttatggcaaaagtacctcaagagagtataaatgatataaaggaaggtcaaaatgtaactatatctacacagtcatattcaggtaaaagttataagggaaaggtaacttatgtaggtaaaagcgtagttacaagtactaatggagcttcgtcttctataagttcaaattcgaattcagatgatgatgattcttacattccggttgagatttctgttgatgataatgatggaaaattgttgccagaatcatcagttgatttaagtataagtagaaaataaataaaaacaaactgttttaaaattaaatttattttaaagcagtttgtttttttgtagtataaaacgcatataagataaggattagttgttatgtgacaatttagagcgctttgtaaatttcttaccattgctccttgaaccgattttttcaccatcgattattcctatgtcatcacctgatttagggaacatttttcttaattctgcattggatttgtctctatccctttgcctgtatttgttattgtccaagataaactcctcctttgtaggattcattcttaattaatttaacctaagttcttttaatttatacaaaaaattattggaaaatgatagtaaggggtgctttgtgtataaattaaagttattaacaataattatgagtagcagtttacaaatgagtgcatatgttgtataaataaagtacttaaatgtcaatatattgtggtgttgatattgtggataacttatgcacatgtttaatgtcaattaacgtataaaaataggttgtttgggaggtactgttgaaaaaacatatagttatcaacagctaaatgttcataagtaggcaaaaatgtggataacataaatttatagtgggttataatataaatttaatattaaaatctgtggattattataaggaggaaaatgtaattgaagatagataatatgacgaaacttgccaaatttgtaaaaaggccaaatagatttcaagcatatatagaattagaaggcgaagaaatgatggttcatgtacccaataccggaagatgcagggaaatattacttccaaattgtactgtggtactgcgagaggaaaataatccaaatagaaaaactaaatatgatttaattggagcatataagggagaaaaatttataaatatagattctcaaattcctaataaagttgtttatgaggcgctttacaataagaaagtggagagcttagctaaatataatattataatgaaagaaaagacctttaaaaacagcagatttgattttagattggaaaatgatgagggagaggtttatttcctggaggttaagggagtaacacttgaggataaaggagttgctagatttccagatgcaccaactgaaagaggagcaaagcatttaaaagaacttgttgaggccaaaaaaagcggatatggggcaggtgtattatttcttatgcaaatggataatataagtgagttcagaccacatgatgagatggacaaaatgtttggagaagcacttagatatgcagcaataaatggtgtagatgtgatggcttacgagtgttctgttgatgaaaaaagtataactcttacaaagagtgttaagatagttctttaaaatttcataataataaattataattggtttattaaagcattgatggaggatttattatgaagtacgagtattgccctatatgtgggaaaaagcttgaaaaaaagtacagctatgatgagggagatgtgccttattgccaaaaagacaaaattatgttctttgatgtacctaaaccatgcgtgctagtagcagttataaaaggacaggaaattttgttgttaaaacaggagtacacatttaaagactcaaaaatattagtttctggttatgtagctaatggtgaaacagttgaggaaactgtagttagagaggttaaagaggaggtaggtataattgtagagaaacccgaatacctgggaagttactatttcaaacctaaagaattaataatgcttacctttatggttaggtatgtatccggggaaataaccaaatcgcaagaggtagatgaggcttactgggtaaatatgagagatgttcttcaagaaatgaatgaagacaaagtaggcaaggatgtagttaagaaggtatttaagagaataggatataacgaagagaagtatttacataaagaaaaatagggaattaccattaaggtaatatccctatttttattatacagtcatatcttttttcttgaatgaataattagctattccgtaacatagtatagtaaagataattaagtatataactccaaatatagctgttgtgaaggtaagccctgaagttgaaggtatactatttgtaagtatatcgtaaggcgaaccatagttagtaaacaagaatggcataataacatgcaaagctgatatttgagaaattatatttaaagctattactatcattatacttaatgtcatagataaaacgctgcttcttaaaacaactgataatagtaagaagaaagaacagcaacctataataaatagtatctggaataagaacatttctattaagaattgccaaagaggaattacgtatgaacttcctaaaataggtataagtcctgtgctgtcctgtgtaagtttaattccagaattcatatatttagttcctacaagtactgggtagctaggattatcgaagccgtaagctataccggttattaagtaggttataagttctattaaaagtattatagcaatacatgatatagcagaagctataaactttgaagccaatatttttgctctgctagctggttttgataaaagaactttaattgtaggaggtgtatattctccagatacaatatcagcagagaaaattgctataataataggaattagtatgtagcctataagctttaataatgattgcaaaagctgaaatgttgataagctattgttgtcttgaggctttatattatgatttaaaaggtactgataaaatactatttgcttattgtatgattcctttgcagtgttttcggtaatatcagcagcctgattcttctcatctttaagagaatctatagtgttttttaattgttttttccaatttgagttaccttgatttttgctttgttgatactgttttatttgctcatccaattgagatatttgttggtcatattgctgttttaaggttgcatccttaatatttttttcctttgattgtaatgatgattttgcatctttataatattgaattgcagcatcaggtgtacttgccttctgcattttcacataaacagcacaaaaaccaatacatattagtgcaaatacaattgtgcatataatgtattttcttttataccttaacttaataaattcgtttttaatgagattccacatcattttttcctccatttacaagttcaatatatctatcttcaagattctgttgtctcttatagatttgttcaattctaatcttcttctctgctaagcttgaagtgatatcaggaacagaatccagttttgcttttgcttcgaaagtgtaaataccattactttcatctgctagtttaaagtcgataataaatgaaatttcttttaatgcttcggtacatttatctttttcttttgtcattataacaacattttcaaaagattcagttttgtgatctttgttagttccttttaatgtttcaaaggattttattattcctccatctataaaagcaactctgtcacaaagttgttctatttctgaaaggatatgtgatgaaacaaaaatagccattttgttttcttttgcttgttttttcaaaaggtttctgaactcgattattccggtaggatcaagaccatttgtaggttcgtctagtattaaaagctttggtttgctgattaatgcttcagcaaggcctaaacgctgtttcatacctaaagagtatttttttaccttttcatcaagtcttccacttaatccaactgtattacctattttttcgatatcttctttagttatatctttgtagaatctagctacctgttctaaattttgtcttcctgtaaggtagctgtataattctgggttttccacaacagcacctacacaagaaagagcttcttctgcttccttagttatatcgtggcctgaaatcattacagaacctttatctggagtgattagccctacgagcattttaattgtagtagttttacctgctccattacggcctaaaaagcctaagatttctccttcttttatagagaaacttatacctttaattatttctttattacccagcttcttgtataagtctgttacctcaagtacgtttgacatgagttatcctcctttatattgatttgcttattattaataaattaatttacctttaaatattgaaaaggatttttttacagtataaagtttatataaataattaaactattactattaaaatagtaacttgaaatgcataaaatgtcaatgtgtaacaaaagatgcaaattagtaaaaaaaacttttaacatttagtaaaaatgtactttaaaaaaatgcatatgtgggtaaaatgttgtaaataaggctttttataaaaagttatttgaaaatacagctacattaataattctaacgattaaaattattcaaatatacttaataaaaaattaatatatataaatatccataattttgaaatttgatattgaaaattatatgaaaaataactataattaaataacttaataaatatattaagcttcggcttagcaatgaagtaggcaatatatctaaatatttatataaagaagggggaaagaaaaaactatgactaataacgataagaataagaaaattgtacctgaagtaaaaggaacacttagaagccatatgattgaactgccagaggttattagaaacgccacaggtataagggtttttggcaaaagacttaaatcttttgttttttcaacagacgttgcagtaataagaaacactaatgcagatgctgtaattgcagtctatccctttactccccaaccagttataactgcggctattgtgcttgcagctgatgttcctgtattttgcggtgtgggtggtggcctaacaatgggcaagagagttgtaaatttagctttagatgctgaatttaaaggggctatgggcgttgtagttaatagtcctacacccaatgacattattagagaagttagagagaccatagatattcctataattgttactgttgtttctgaatatgaagatgttcaagcaaggattgattctggagctacaatattaaatgtatcaggtgctaaaagaacctctcatatagtaagaagtataagagaaaagttccctagcattcccataatagcaacaggaggtaataatgaagcatctataattgagactatagaggctggagcaaatgctataacgtatactccaccaacaactggaaaaatatttggagatacaatgaacagctatagaaagaaatttgagtagaagtataaaactttatatattctaaggtatggggcttcaaaagtatgaacttaggttattttttagtaattatatatagaaggaatcaattcacttttgaagaaacccattgaaattgactatatttacgtaaaaataagaggtgaagagcatgatagctgaaggaaataattgcaaacattgtgatgaatttaagaacaaagcatgtaatggagaagttaatgactgtatgtgtaagaagtgtccaagaaacttaggacagtgtatagttacaaagtattgtagagaaactgaatcaattatttatattaatacatagggcacaacaagaaaaatagcaataaaacgttatcataacgtggtaataaaaaataaaatgatataataggctaaaatagcaaaaaatcgctagatattaagattgatgaaaaattatgaagatgatataatgtaaacgtaatcaagaatgattgcacaaagtaattgttttaaatgctaggggattctaaagttatttaattagtaggagttcaatgttatatgttaaggtttttattatgtgggtggtaaaaacaaaagcatatttcttagaggctcttacaggtttccaatgtaaaaggggtcttacattggaagggcgctttaactttgtcggcggaaatataacatatatggatgacaaggttaaagcaagttttttagggtttaatttagggagtttaatataaaataaaagctgttattttagggataataacagcctttatttttttattttttgaattttatgttcagataatatttaacaccgctattgtctagtatagaatttaatatgttctttatagatttttttgagtttgaaagagctttattataatacgtatcttctagcattttagtgctcatatctttttttacattttgcataatagcttcatgctcttcagtagttaattttatttcgccaaatctaaaaagaccgttatcggtttgatattgtgttttactatcatcaatatttatagattctatttgtggggttgaaacattaagagttattattctacttttgttgtctatacttatattctcattttttaaattagataagtcaatggaataagtgcctgtaccagtaaaagatatattttgtagcttcttaaagatatcaagatttccccagctattatcaatagttactttttcacttatctgtgcctctgttgttataagcttttgtttttgttctattttttttattaaggtttccttacttataaattttttagaaatgtcgtctgcatctgcaactacccaaggtttagactgggatgtagacattttattaaaaaccttataagcagcaaagaaaccaattagtatacataagaacattattataaagaaagttttcttttgtacttttattttcaatttaatacctcatttcttaattagtaggtttgaagaaaatcatataatgctggatatacgtttaaatcagccattaatttcatatatgagtccattgcttcttcatttgaatcagtcttttttatggctctaataagtaagttcttaggtgtttcaagaggagatatgtattctactggagttacatcatacccctttgcctctaacataagacttctcattccgtctgttaacacatctgcaaatcttgctttgaaaataccatgctttaatatatctttaaatggttcataactatattgagataacatctccttgtgacagcaaggtacagcaataatagcatcactttctaaccttatgccaagagctaaagccatatctgtagcagtatcacatgcgtgaagagaaataaccatgttaatctttctatctggtttatagtcatgtatatccatagcgtaaaaatccatatttctatacccgagtgtttgggctatagattttgatttttggattacagcttcagatatatcaatgcctataaaactacactttactttttttacttctgtaagatagtaattaagagcaaaggtcaagtacgattttccgcagccacagtctagtatggtaatatgtttatttctagatattgaatccaatgtggagtctattaactcaataaagtgatctatttgattgtactttcttattttgtcgtttttcaccttattgtcctttgtcattatatctatggcttttaataaatcatttgctgggccgatttttataaggtaatttctatttaataaggttgaagttttatctttctcactagacttttctattatattgatgttttttatattaacgtttttatcatcagcggtaacaagtacatttgttccacgttcgctataaataagttctaaagaatcataagacacacaattattaattatggcttcaattaaagaatctatagtgaataaatcggttttaccattaaaattaaaagcgagtttattatcgttactgtaaacagcctttcctgtaaaatgcttaagtcctgaagtgtatgttatagtaatttctttaaaaatagcctcattctctagaaatctattttttattccagataatattaaagttaatttagataaattcttcttattcatattttagcaccgtccttgaaatgtggttaaatatttaaattgatgttatttatataagattcactttggttttcatatatcaaatatgttacaaaattaagttaattattcatttagaaatcctataataaaaatgtaattatattttatcatattatgtatgtatatgatataatttaaaatgtgcgtttgttgcataatagagttagaaattttaaaaatattagtgaaaattgggtgaaggtcatatgctaaaaggcaaatatacaaaaattgaaaaagtaaatggtgtggagagggaataccttataactgataaatacggtataacaataggaagaatatttatagtggatttaaacaaagataatagattctgtatgtttagaatgaagatatataagcaaggtaaaagtataaatacatacattaaagagatcttatctgttttcatggagttcctatttaaaagtaatgatatcaataaggtaaatataattgtagacgaggaagtaagcacacagccgtttgttgaattaggatttgcttttgagggaattattaataaaagtattattgaaaaaaatgtacttaaagatgagtttttatttggaatggattataagaactataatagtgatagaataaatgtttttaagctatatggtaaaagtataacactaaaagtattgacgccagaggatgctgagaatatgcttcaatattatattaaaaataaagagcacctaaagccttttgaacccgagagagaagaaagtttttatacgtttgaagcacaaaaacagatgcttatagagaattataagcaatttataaatggtgaaggtactaattttggaatttataaggacgctaagttaataggtaagattcaaatatccggtacaatatatggagtatttaaaagtgcaataataggatattctattgataaagactatcaaggaaaagggtatatgaaggatgcacttagagttgcagaagcatacgcttttaatgttatgaatttgcatagaatagaagcatctgcactagtagataatttgagatcacaaaatgttttaattggatgtggttttgaaaaattaggaataaataaaaactatctatttataaatggaagatggcaagatcatataaccttttataaaaccaataacaattaaaggggtatataggtatactataagaagaaaaatttaatgatttagagaatttcaatataaacttagccttgagtatcagtagagtttaaatgtagtaaacgtaaagaaaggctaattaaacaaagataatttgtaataataagatataagactaagaaactgttttaaaaaaagtagtactatattacatgtcgtcaccgagaacttgtttcttacagtattaaacatttttaaaatattaaataaaagatgttgacaaagttaaatgatgatgatattatgtataagctgtctagtgcagcggataattgaactttgaaaattaaacagagaattaaagaaccagcaattcttttgaatagaatttattctatttaaataaatttagcgatgagctaaaggaatacagactagcatctgtattatatcaaacttttaaattgagagtttgatcctggctcaggacgaacgctggcggcgtgcttaacacatgcaagtcgagcggggaacttcggttcccagcggcggacgggtgagtaacacgtgggtaacctacctcatagtggggaatagcctttcgaaaggaagattaataccgcataatactcgagaatcgcatgattcttgagccaaaggatttattcgctatgagatggacccgcggcgcattagcttgttggtgaggtaacggctcaccaaggcttcgatgcgtagccgacctgagagggtgatcggccacattggaactgagacacggtccagactcctacgggaggcagcagtggggaatattgcacaatgggggaaaccctgatgcagcaacgccgcgtgagtgatgaaggtcttcggatcgtaaaactctgtcttatgggacgataatgacggtaccataggaggaagccacggctaactacgtgccagcagccgcggtaatacgtaggtggcaagcgttgtccggatttactgggcgtaaaggatgtgtaggcggatatttaagtgagatgtgaaatccccgggcttaacttgggggctgcatttcaaactggatgtctggagtgcaggagaggaaggcagaattcctagtgtagcggtgaaatgcgtagagattaggaagaataccagtggcgaaggcggccttctggactgtaactgacgctgaggcatgaaagcgtggggagcaaacaggattagataccctggtagtccacgccgtaaacgatgaatactaggtgtaggaggtatcgactccttctgtgccgcagttaacacaataagtattccgcctgggaagtacggtcgcaagattaaaactcaaaggaattgacggggacccgcacaagcagcggagcatgtggtttaattcgaagcaacgcgaagaaccttacctagacttgacatctcctgaattagtccgtaatggatgaagtcccttcggggacaggatgacaggtggtgcatggttgtcgtcagctcgtgtcgtgagatgttgggttaagtcccgcaacgagcgcaacccttatcattagttgctaacatttagttgagcactctagtgagactgcccgggttaaccgggaggaaggtggggatgacgtcaaatcatcatgccccttatgtctagggctacacacgtgctacaatggtggggacaaaaagatgcaatatcgcaaggtggagcaaaactcaaaaccccatcccagttcggattgtaggctgaaactcgcctacatgaagccggagttgctagtaatcgcgaatcagaatgtcgcggtgaatacgttcccgggtcttgtacacaccgcccgtcacaccatgagagtcggcaacacccgaagcccgtgaggtaaccttttggaaccagcggtcgaaggtggggttgataattggggtgaagtcgtaacaaggtagccgtaggagaacctgcggctggatcacctcctttctaaggagtcgacatggaaatgtaatttccatgaaggttctttgttctctgtttaattttgagagtttaattctctctaaatttgtactttgaaaattgcatagtaatcaatatagagtaatactctaaagcaaggcaaagttaattctttgttgtttgaatttaaatatatttacttaaggtcaagctacaaagggcgcatggtgaatgccttggcactaggagccgatgaaggacgtgataagctgcgataagcttcgggtaggcgcaaatagcctgtgaaccgaagatttccgaatgaggaaactctcatgggtaaccccatgaactgtatactgaattcataggtatatagaggtaaacccggggaactgaaacatctaagtacctggaggaagagaaagaaaaatcgatttccttagtagcggcgagcgaaacggaaagagcccaaaccggaaacttgtttccggggttgcggtcagatcattaaggctttatatcttaaccgaagatttctggaaagttaaaccatagaaggtaatagtcctgtaggtaaaaagagaaaaaagcccgatttgtaccagagtaccacgagacacgtgaaaccttgtgggaagctgggaggaccacctcccaaggctaaatactacctagtgaccgatagtgaagaagtaccgtgagggaaaggtgaaaagaaccccaggaggggagtgaaatagaacctgaaaccgtgtgtccacaaccgatcaaaacacgttaatgtgtgatgatgtgctttttgtagaacgagccagcgagttacggtatgcagcaaggttaagcacttaaggtgcgcagccgaagggaaaccaagtctgaatagggcgtatagttgcatgctgtagacccgaaaccgggtgacctatccatggccagggtgaagcggaagtaaaattccgtggaggcccgaaccacaatggtgttgaaaaaccatgggatgagctgtggataggggagaaattccaatcgaactcggatatagctggttctcctcgaaatagctttagggctagcgccatgaatgagtaccggaggtagagcactgaatgaggtaggggctgacaacagttaccgaactttatcaaactccgaatgctggatacttgaatcatggtagtcagactgcgaatgataagatccgtagtcaaaagggaaacagcccagatcaccagctaaggtcccaaagtatagattaagtggtaaaggatgtgggatttctaagacaactaggatgttggctcagaagcagccatacattaaaagagtgcgtaatagctcactagtcaagagatcctgcgccgaaaatgtccggggctaaaatctaacaccgaagctgtgaacttgtacttcgtacaagtggtagaggagcatcctgtatgggctgaagtcgtaccgaaaggagcggtggactgtacaggagagagtatgctggcataagtagcgagaactaagtgagaatcttagtggtcgaaaacctaaggtttcctggggaaggttcgtccgcccagggtaagtcgggacctaaaccgaggccgaaaggcgtaggtgatggacaatcggttgatattccgataccgcagagtaacgttatgagaaatgggatgacgcaggaggataggatatgcgtacgttattggaagtacgtctaagcactgaggatgaaagataggaaaatccgtctttcgttaagtctggggtgtaatggtgaggtagtttactaccgaaatatctgatttcatgctgccaagaaaagtctctatccaggagctctgtgcccgtaccgcaaaccgacacaggtaggtgaggagagaatcctaagaccatcggaagaattgctgttaaggaactcggcaaattgaccccgtaacttcgggagaaggggtgcctacgagagtaggtcgcagagaataggcccaagcaactgtttatcaaaaacacaggtttctgctaaagcgaaagctgaagtataggagctgacgcctgcccggtgctggaaggttaaggggaatgcttagcgcaagcgaaggcatgaacttaagccccagtaaacggcggccgtaactataacggtcctaaggtagcgaaattccttgtcgggtaagttccgacccgcacgaatggcgtaatgatttgggcactgtctcaacagcaaatccggcgaaattgtagtgcaagtgaagatgcttgctacccgcgattggacggaaagaccccgtagagctttactgtatcttagcattgaatctcggtattgtctgtacagaataggtgggagacttggaagcagttccgtcagggattgtggagtcgtctttgggataccaccctgacagtactggggttctaaccggaggccatgaaactggtcacgggacatagctaggagggcagtttgactggggcggtcgcctcctaaaaagtaacggaggcgcccaaaggttccctcagcgcggttggaaaccgcgcgtagagtgcaaaggcagaagggagcctgactgcgacacaaacaagtggagcagagacgaaagtcgggcttagtgatccggtgacacctcgtgggagggtcatcgctcaacggataaaagctacctcggggataacaggctgatctcccccaagagtccacatcgacggggaggtttggcacctcgatgtcggctcgtcgcatcctggggctgaagtaggtcccaagggttgggctgttcgcccattaaagcggcacgcgagctgggttcagaacgtcgtgagacagttcggtccctatccgtcgcgggcgaaggaaatttgagaggagctgtccttagtacgagaggaccgggatggactgacctctggtgtaccagttgtcttaccaaaggcacggctgggtagctatgtcgggaagggataaacgctgaaggcatctaagcgtgaagcccacctcaagattagatttcccataacataagttagtaagacccctgtaagaacaacaggtgataggtcagaggtgtaagaatggtaacattttaagctgactgatactaataggtcgagggcttgaccaatataaaagtaaatatattaagattactatgcaattttgaaagtacaaagtactttcgaaaactaaataaattaatccggtgactatagcttggttgtaacacccgttcccataccgaacacgaaggttaagaaccaaagcgccgatggtactgcaggggcagccctgtgggagagtaggtcattgccgggtagagaagtgaatgttttaataatggagcattcacttttctactccaagaggaaattatcctcatgaaaaataattataaaatatgtattgactttataattaaatgtgatatgatagtattcgttgtctcaagtttgttacttttaaaaataaaaaagtttttaaaagatgttgacaaatcttgctgaaaatgatattatatataagctgtctagtgcagcgaacaattgaactttgaaaattaaacagagaattaaagaaccagcaattcttttgaatagaatttattctatttaaataaatttagcgatgagctaaaggaatacagactagcatctgtattatatcaaacttttaaattgagagtttgatcctggctcaggacgaacgctggcggcgtgcttaacacatgcaagtcgagcggggaacttcggttcccagcggcggacgggtgagtaacacgtgggtaacctacctcatagtggggaatagcctttcgaaaggaagattaataccgcataatactcgagaatcgcatgattcttgagccaaaggatttattcgctatgagatggacccgcggcgcattagcttgttggtgaggtaacggctcaccaaggcttcgatgcgtagccgacctgagagggtgatcggccacattggaactgagacacggtccagactcctacgggaggcagcagtggggaatattgcacaatgggggaaaccctgatgcagcaacgccgcgtgagtgatgaaggtcttcggatcgtaaaactctgtcttatgggacgataatgacggtaccataggaggaagccacggctaactacgtgccagcagccgcggtaatacgtaggtggcaagcgttgtccggatttactgggcgtaaaggatgtgtaggcggatatttaagtgagatgtgaaatccccgggcttaacttgggggctgcatttcaaactggatgtctggagtgcaggagaggaaggcagaattcctagtgtagcggtgaaatgcgtagagattaggaagaataccagtggcgaaggcggccttctggactgtaactgacgctgaggcatgaaagcgtggggagcaaacaggattagataccctggtagtccacgccgtaaacgatgaatactaggtgtaggaggtatcgactccttctgtgccgcagttaacacaataagtattccgcctgggaagtacggtcgcaagattaaaactcaaaggaattgacggggacccgcacaagcagcggagcatgtggtttaattcgaagcaacgcgaagaaccttacctagacttgacatctcctgaattagtccgtaatggatgaagtcccttcggggacaggatgacaggtggtgcatggttgtcgtcagctcgtgtcgtgagatgttgggttaagtcccgcaacgagcgcaacccttatcattagttgctaacatttagttgagcactctagtgagactgcccgggttaaccgggaggaaggtggggatgacgtcaaatcatcatgccccttatgtctagggctacacacgtgctacaatggtggggacaaaaagatgcaataccgcaaggtggagcaaaactcaaaaccccatcccagttcggattgtaggctgaaactcgcctacatgaagccggagttgctagtaatcgcgaatcagaatgtcgcggtgaatacgttcccgggtcttgtacacaccgcccgtcacaccatgagagtcggcaacacccgaagcccgtgaggtaaccttttggaaccagcggtcgaaggtggggttgataattggggtgaagtcgtaacaaggtagccgtaggagaacctgcggctggatcacctcctttctaaggagtcgacatggaaatgtaatttccatgaaggttctttgttctctgtttaattttgagagtttaattctctctaaatttgtactttgaaaattgcatagtaatcaatatagagtaatactctaaagcaaggcaaagttaattctttgttgtttgaatttaaatatatttacttaaggtcaagctacaaagggcgcatggtgaatgccttggcactagaagccgatgaaggacgtgataagctgcgataagcttcgggtaggcgcaaatagcctgtgaaccgaagatttccgaatgaggaaactctcatgggtaaccccatgaactgtatactgaattcataggtatatagaggtaaacccggggaactgaaacatctaagtacctggaggaagagaaagaaaaatcgatttccttagtagcggcgagcgaaacggaaagagcccaaaccggaaacttgtttccggggttgcggtcagatcattaaggctttatatcttaaccgaagatttctggaaagttaaaccatagaaggtaatagtcctgtaggtaaaaagagaaaaaagcccgatctgtaccagagtaccacgagacacgtgaaaccttgtgggaagctgggaggaccacctcccaaggctaaatactacctagtgaccgatagtgaagaagtaccgtgagggaaaggtgaaaagaaccccaggaggggagtgaaatagaacctgaaaccgtgtgtccacaaccgatcaaaacacgttaatgtgtgatgatgtgctttttgtagaacgagccagcgagttacggtatgcagcaaggttaagcacttaaggtgcgcagccgaagggaaaccaagtctgaatagggcgtatagttgcatgctgtagacccgaaaccgggtgacctatccatggccagggtgaagcggaagtaaaattccgtggaggcccgaaccacaatggtgttgaaaaaccatgggatgagctgtggataggggagaaattccaatcgaactcggatatagctggttctcctcgaaatagctttagggctagcgccatgaatgagtaccggaggtagagcactgaatgaggtaggggctgacaacagttaccgaactttatcaaactccgaatgctggatacttgaatcatggtagtcagactgcgaatgataagatccgtagtcaaaagggaaacagcccagatcaccagctaaggtcccaaagtatagattaagtggtaaaggatgtgggatttctaagacaactaggatgttggctcagaagcagccatacattaaaagagtgcgtaatagctcactagtcaagagatcctgcgccgaaaatgtccggggctaaaatctaacaccgaagctgtgaacttgtacttcgtacaagtggtagaggagcatcctgtatgggctgaagtcgtaccgaaaggagcggtggactgtacaggagagagtatgctggcataagtagcgagaactaagtgagaatcttagtggtcgaaaacctaaggtttcctggggaaggttcgtccgcccagggtaagtcgggacctaagccgaggccgaaaggcgtaggtgatggacaatcggttgatattccgataccgcagagtaacgttatgagaaatgggatgacgcaggaggataggatatgcgtacgttattggaagtacgtctaagcactgaggatgaaagataggaaaatccgtctttcgttaagtctggggtgtaatggtgaggtagtttactaccgaaatatctgatttcatgctgccaagaaaagtctctatccaggagctctgtgcccgtaccgcaaaccgacacaggtaggtgaggagagaatcctaagaccatcggaagaattgctgttaaggaactcggcaaattgaccccgtaacttcgggagaaggggtgcctacgagagtaggtcgcagagaataggcccaagcaactgtttatcaaaaacacaggtttctgctaaagcgaaagctgaagtataggagctgacgcctgcccggtgctggaaggttaaggggaatgcttagcgcaagcgaaggcatgaacttaagccccagtaaacggcggccgtaactataacggtcctaaggtagcgaaattccttgtcgggtaagttccgacccgcacgaatggcgtaatgatttgggcactgtctcaacagcaaatccggcgaaattgtagtgcaagtgaagatgcttgctacccgcgattggacggaaagaccccgtagagctttactgtatcttagcattgaatctcggtattgtctgtacagaataggtgggagacttggaagcagttccgtcagggattgtggagtcgtctttgggataccaccctgacagtactggggttctaaccggaggccatgaaactggtcacgggacatagctaggagggcagtttgactggggcggtcgcctcctaaaaagtaacggaggcgcccaaaggttccctcagcgcggttggaaaccgcgcgtagagtgcaaaggcagaagggagcctgactgcgacacaaacaagtggagcagagacgaaagtcgggcttagtgatccggtgacacctcgtgggagggtcatcgctcaacggataaaagctacctcggggataacaggctgatctcccccaagagtccacatcgacggggaggtttggcacctcgatgtcggctcgtcgcatcctggggctgaagtaggtcccaagggttgggctgttcgcccattaaagcggcacgcgagctgggttcagaacgtcgtgagacagttcggtccctatccgtcgcgggcgaaggaaatttgagaggagctgtccttagtacgagaggaccgggatggactgacctctggtgtaccagttgtcttaccaaaggcacggctgggtagctatgtcgggaagggataaacgctgaaggcatctaagcgtgaagcccacctcaagattagatttcccataacataagttagtaagacccctgtaagaacaacaggtgataggtcagaggtgtaagaatggtaacattttaagctgactgatactaataggtcgagggcttgaccaatataaaggtaaatatattaagattactatgcaattttgaaagtacaaagtactttcgaaaactaaataaattaatccggtgatcatagcttggttgtaacaccagttcccataccgaacacgaaggttaagaaccaaagcgccgatgcgtactgcaggggcaaccgtgtgtcaaatgaggtcattgccgggtagagaagtgaatgttttaataatggagcattcacttttctactccaagaggaaattatcctcatgaaaaataattataaaatatgtattgactttataattaaatgtgatatgatagtattcgttgtctcaagtttgttacttttaaaaataaaaaagtttttaaaagatgttgacaaatcttgctgaaaatgatattatatataagctgtctagtgcagcgaacaattgaactttgaaaattaaacagagaattaaagaaccagcaattcttttgaatagaatttattctatttaaataaatttagcgatgagctaaaggaatacagattagcatctgtattatatcaaacttttaaattgagagtttgatcctggctcaggacgaacgctggcggcgtgcttaacacatgcaagtcgagcggggaacttcggttcccagcggcggacgggtgagtaacacgtgggtaacctacctcatagtggggaatagcctttcgaaaggaagattaataccgcataatactcgagaatcgcatgattcttgagccaaaggatttattcgctatgagatggacccgcggcgcattagcttgttggtgaggtaacggctcaccaaggcttcgatgcgtagccgacctgagagggtgatcggccacattggaactgagacacggtccagactcctacgggaggcagcagtggggaatattgcacaatgggggaaaccctgatgcagcaacgccgcgtgagtgatgaaggtcttcggatcgtaaaactctgtcttatgggacgataatgacggtaccataggaggaagccacggctaactacgtgccagcagccgcggtaatacgtaggtggcaagcgttgtccggatttactgggcgtaaaggatgtgtaggcggatatttaagtgagatgtgaaatccccgggcttaacttgggggctgcatttcaaactggatgtctggagtgcaggagaggaaggcagaattcctagtgtagcggtgaaatgcgtagagattaggaagaataccagtggcgaaggcggccttctggactgtaactgacgctgaggcatgaaagcgtggggagcaaacaggattagataccctggtagtccacgccgtaaacgatgaatactaggtgtaggaggtatcgactccttctgtgccgcagttaacacaataagtattccgcctgggaagtacggtcgcaagattaaaactcaaaggaattgacggggacccgcacaagcagcggagcatgtggtttaattcgaagcaacgcgaagaaccttacctagacttgacatctcctgaattagtccgtaatggatgaagtcccttcggggacaggatgacaggtggtgcatggttgtcgtcagctcgtgtcgtgagatgttgggttaagtcccgcaacgagcgcaacccttatcattagttgctaacatttagttgagcactctagtgagactgcccgggttaaccgggaggaaggtggggatgacgtcaaatcatcatgccccttatgtctagggctacacacgtgctacaatggtggggacaaaaagatgcaataccgcaaggtggagcaaaactcaaaaccccatcccagttcggattgtaggctgaaactcgcctacatgaagccggagttgctagtaatcgcgaatcagaatgtcgcggtgaatacgttcccgggtcttgtacacaccgcccgtcacaccatgagagtcggcaacacccgaagcccgtgaggtaacctgaggtaaccttttggaaccagcggtcgaaggtggggttgataattggggtgaagtcgtaacaaggtagccgtaggagaacctgcggctggatcacctcctttctaaggagtcgacatggaaatgtaatttccatgaaggttctttgttctctgtttaattttgagagtttaattctctctaatttgtactttgaaaattgcatagtaatcaatatagagtaatactctaaagcaaggcaaagttaattctttgttgtttgaatttaaatatatttacttaaggtcaagctacaaagggcgcatggtgaatgccttggcactaggagccgatgaaggacgtgataagctgcgataagcttcgggtaggcgcaaatagcctgtgaaccgaagatttccgaatgaggaaactctcatgggtaaccccatgaactgtatactgaattcataggtatatagaggtaaacccggggaactgaaacatctaagtacctggaggaagagaaagaaaaatcgatttccttagtagcggcgagcgaaacggaaagagcccaaaccggaaacttgtttccggggttgcggttagatcattaaagctttatatcttaaccgaagatttctggaaagttaaaccatagaaggtaatagtcctgtaggtaaaaagagaaaaaagcccgatctgtaccagagtaccacgagacacgtgaaaccttgtgggaagctgggaggaccacctcccaaggctaaatactacctagtgaccgatagtgaagaagtaccgtgagggaaaggtgaaaagaaccccaggaggggagtgaaatagaacctgaaaccgtgtgtccacaaccgatcaaaacacgttaatgtgtgatgatgtgctttttgtagaacgagccagcgagttacggtatgcagcaaggttaagcacttaaggtgcgcagccgaagggaaaccaagtctaaatagggcgtatagttgcatgctgtagacccgaaaccgggtgacctatccatggccagggtgaagcggaagtaaaattccgtggaggcccgaaccacaatggtgttgaaaaaccatgggatgagctgtggataggggagaaattccaatcgaactcggatatagctggttctcctcgaaatagctttagggctagcgccatgaatgagtaccggaggtagagcactgaatgaggtaggggctgacaacagttaccgaactttatcaaactccgaatgctggatacttgaatcatggtagtcagactgcgaatgataagatccgtagtcaaaagggaaacagcccagatcaccagctaaggtcccaaagtatagattaagtggtaaaggatgtgggatttctaagacaactaggatgttggctcagaagcagccatacattaaaagagtgcgtaatagctcactagtcaagagatcctgcgccgaaaatgtccggggctaaaatctaacaccgaagctgtgaacttgtacttcgtacaagtggtagaggagcatcctgtatgggctgaagtcgtaccgaaaggagcggtggactgtacaggagagagtatgctggcataagtagcgagaactaagtgagaatcttagtggtcgaaaacctaaggtttcctggggaaggttcgtccgcccagggtaagtcgggacctaagccgaggccgaaaggcgtaggtgatggacaatcggttgatattccgataccgcagagtaacgttatgagaaatgggatgacgcaggaggataggatatgcgtacgttattggaagtacgtctaagcactgaggatgaaagataggaaaatccgtctttcgttaagtctggggtgtaatggtgaggtagtttactaccgaaatatctgatttcatgctgccaagaaaagtctctatccaggagctctgtgcccgtaccgcaaaccgacacaggtaggtgaggagagaatcctaagaccatcggaagaattgctgttaaggaactcggcaaattgaccccgtaacttcgggagaaggggtgcctacgagagtaggtcgcagagaataggcccaagcaactgtttatcaaaaacacaggtttctgctaaagcgaaagctgaagtataggagctgacgcctgcccggtgctggaaggttaaggggaatgcttagcgcaagcgaaggcatgaacttaagccccagtaaacggcggccgtaactataacggtcctaaggtagcgaaattccttgtcgggtaagttccgacccgcacgaatggcgtaatgatttgggcactgtctcaacagcaaatccggcgaaattgtagtgcaagtgaagatgcttgctacccgcgattggacggaaagaccccgtagagctttactgtatcttagcattgaatctcggtattgtctgtacagaataggtgggagacttggaagcagttccgtcagggattgtggagtcgtctttgggataccaccctgacagtactggggttctaaccggaggccatgaaactggtcacgggacatagctaggagggcagtttgactggggcggtcgcctcctaaaaagtaacggaggcgcccaaaggttccctcagcgcggttggaaaccgcgcgtagagtgcaaaggcagaagggagcctgactgcgacacaaacaagtggagcagagacgaaagtcgggcttagtgatccggtgacacctcgtgggagggtcatcgctcaacggataaaagctacctcggggataacaggctgatctcccccaagagtccacatcgacggggaggtttggcacctcgatgtcggctcgtcgcatcctggggctgaagtaggtcccaagggttgggctgttcgcccattaaagcggcacgcgagctgggttcagaacgtcgtgagacagttcggtccctatccgtcgcgggcgaaggaaatttgagaggagctgtccttagtacgagaggaccgggatggactgacctctggtgtaccagttgtcttaccaaaggcacggctgggtagctatgtcgggaagggataaacgctgaaggcatctaagcgtgaagcccacctcaagattagatttcccataacataagttagtaagacccctgtaagaacaacaggtgataggtcagaggtgtaagaatggtaacattttaagctgactgatactaataggtcgagggcttgaccaatataaaggtaaatatattaagattactatgcaattttgaaagtacaaagtacttttgaaaactaaataaattaatccggtgactatagcttggttgtaacacccgttcccataccgaacacgaaggttaagaaccaaagcgccgatggtactgcaggggcagccctgtgggagagtaggtcattgccgggtaatttggtttattagctcagttggtagagcacatgacttttaatcatggtgtccggggttcgactccccgataagccaccataaacgctttgaaatttaattttaaagcgtttttttacatatttattttacgataggagaagaatatatgagcgataagatagtaatatttgatatggatggagtaatagttgatacggagcccatatatagaaaattaagtgatagattgtatgagagtttaggaataaatctcacaaaggaagatcaatatgcacttgcaggaagtgtatcacaagataaatggacacttttaaagaagcaattcaatctcaagtatcctattgaagagttaatgaagatgtcttcaggaattaaatatgattatttagctaatgaggaaaatgaaataccattaattgaaggtgttgacaaacttattttaagcctaaagagtagaggaattatgatgtgtgttgcatcgtcatctcgtagaaaaaatatagaaattattcttaaaagggtaggacttattagctattttgagtatatagtaagtggcagcgatgtagagaagggaaaaccacatccggaaatattcttaagagcagcatctatgtttgatgacaatatcttaaattttactgtaattgaagatacaaataatggtgttagagctgcaaagagtgcaaaaatgaaatgtgtagggtttagtaatccaaattcgggaactcaaaatattagcagtgcggatattattgtagataatttcggtgatgaaagcataagtagaattataaatttagttttaaaatagtgattttttattaacagaggttaggattttaattaaaatcctaacctctgttttgttttcaagaacttatttttttcttttttaagttgtaataagatgttgcaatgtggcctaaatcctagtaattttaataactttaaaagtgtcattgaaaacgtataccaaaaatgaacttgtccacgttgaaaacgatcgcattttgttttatcatgttaattgtaaggaataataataatataaaataatatggaggatacgatatggaaacttataaagattctacacaagtatcaaaatcatcattaaagaaaaagattcaaggttttggtggttttttaagtggcatggtaatgcccaatataggagcctttatagcttggggtttaataacggcattatttattaaaacagggtggttacccaacgataatctttccaaacttgtagatccaatgatacattatatgcttcctatgcttataggatatcaaggtggtaagcttgtatatgatacaagaggtggtgtagtaggagcaatagctaccatgggtatgatagtaggagcttcaataccaatgttccttggaggaatgataataggtcctttaggcggatatgttataaagaagttcgataaggctattgaaaataaaattccaacaggctttgagatgttagttaataacttttcagctggaattttaggtgcggctcttgcaataatctcatatgttgcagttggtcctgtagttgcaggagcatcaacaggattaggttcgatagcattagctattacaaatcaaggattacttccactaatagcggtagtagtagagccagctaagatattatttttaaacaatgctattaaccacggtgtattctcaccacttggaattgaacaagtacaacatcttggtaaatcagtattcttcttacttgaagcagatccaggtccgggactaggaattcttttagcttactctttatatggcaagggttcagcaaaaaattcagctccaggggcagttataatacattttcttggcggaatacatgaaatttacttcccttatgttttaatgaaaccgtttttacttttagcagtaatagctggtggaatttgtgcagatttaacgtttgttttattaaaagcaggtttagttgcagcagcttcaccaggaagtatcatagctatactggcaatgagtcctaaaggtgggcaacttccagtattagcaggagttgcggtaggagcaatagtatctttcgtagtagcatcaattatcctaaaaggaagtaaagaaaaatcaaaagataattttgaagaagctcaaaacaagatgaaagaaatgaaaaaagaaagcaaaaatcaaacaactgctaatagtgaaaatgttaaaaataatgatgaattagtaagttctgatattaaattaatagtttttgcatgtgatgcaggtatgggatcatcagcaatgggagaatctatattaaagaaagaactaaaaaatgcaaatatcgatggaataaaagttcaacattattcagtagatagtattccaaaagaagcagatgtagtatttgtgcaagaaaatttaagcgaaagagcaagaaaaagtgctccagatgctaatatagtaacaataaaaaatttcttagatcgttcaacttatgaagggtttatgaaaaaaattaaaaaataaatagtaactaggtgagtgagtatgaattctttaactcctagacagcagtatatactaagtgagttaataaaaaaaaaggtgtctaatgtagatgttcttcataaagagcttgcagtaagtataagaactattttaagagaggttgcatctataaataaggttttaaaaaaagataaaataactatctatgattatgaaaatatgaatttggttatatctggggatagagatagtattaaaaatttggaaaattcaattaattatatccccattttatggctatgcaataaagatcaaaggcagatagcaattacatgtaaattgttatccgaagaagaatatttaaaagcatcatattttagctacaaatttaatgtagtaatgggaagcataagtcaggatttggataatattcagacattacttgtaaacaagaacctacatcttataagaaaaagaacctatggaataatgatagatggttccgaatggaataaaagaaatgcttttgttgagttatttttcagatttaaaccttttgaatatttgttatcattcctttatggacataagacagatgaaacagtggaagctttttttaaagatatatttgatgcaaaaacaatagatattgttaaggaaattttcaaaaaacttcattttggtagtactaatgttaatgatattaagtattttagcttatttttactaacacttcttgctataaaaaagacagaaagcaaaaaaaatataaatctaccgaataaagtaaagcaggatatgaaaagtagcattatatataacacactaagatcactgcaagaaaaattgatggaaaataatataatattacctgaagatgagttaagttatttatgtttacatttaaatgattacaaatactataatgatgccgaagaaaataacattgaggcagacattaattatacagagataagcaatgaattggttacaggggtatcaaaaaaaataggaataaatattactaaagataaaaaattggtagaggatttatctaatcatttaaaacaaaccttccatatgcttagtgtaggacttgatattataaatcctctattaaatgaaattaaagaacactattctcaattgtttgccataataaacaatgagtgtaaacttattttttctagatataatataaaaatattggaagaagaaattggatatataacaatgcatatagatgtagccattcaaagacaacagatattcagtaaaaagataaatctgcttattgtatgtcctaatggtatgagtagtggaaacatattaggtaataaggttaaatcacttttttcagatatagaaagtataactattagttctatacatgatgcttatgaaaagatggttaataatgagtatgatttaattttatcaacagtgccaataagtttacaaataagcaatgtaatagtcgtttcaccttttatgacaaatgaggacattgaagaagtaagaaattttatctttaaaataaaaatggagaagcagaatatagctatagatttttcagatagacttaaaatcgatgctacaaatatggagtatgaaactattagttccatattgaaaagttttgatgtaagggaggtaaaagttaatacttttgatgaattgatagattatattgtaacagacatttatgatagtaatttaagcaaaagcaaagaagcaattaaaaagctaatactaaaaagagaggaaaaaggtaatgttgtagttcctaaaagtggaatagcattacttcatactagaagtaatgaacttatgaatccagttataagagtgtatcgtaataataaatatttttcgatgtcaagtgaaggtttttcaacagaggacataaatacttttttagtgcttttagctagaaatgatgagagtaactatgtgttacagttcttagggaaagtaagtatttcattaatggaaagaaaaggatttgttcaaatgttgagatatagtaattcgcaggatattaggaactgcttaatagatattgccaataaggaggaagttatttatgaatagacagattttatcaggagataacattttattagagttgaaatcagaatctaaggatgctgcaatagaaagagctggaaaacttttagtttctagaggttatgttaaggaaaactatataaatggaatgaaagccagagaagaagaagttacaacatatatggggaatggtgtcgctatacctcatggtatgaatgaatataaaaaagatattatggattcgggtatagttatagctcaatatcctgaaggcgttgactttggtgaaggaaatatagcttatatagttataggaattgcaggtagaggagaagaacatatgcaaatactatctcaaatagcccttacggttcaatatgaagaaaatgttgaaagacttagaaatgctaaaaataaagaggaaattattaagataatagaggaaggtgatgactagaatgaaagcacttcattttggagcaggaaacataggaagaggttttataggttatttactgtataagtctaattacgaaactaccttcgttgatatatttgataaagtagtggatgatatcaataaatataaaagatatacagtaataactttgagtacatctaagaataaggagaaagttgagaatgtacgagcagtcaatttgaaagatagtgttgctcttgaaaaagaagttttagaagctgatttaataactacatcattaggattaaacaatttaaaaagtacaggagagcttttaagaggattccttaaaaagagatcagaaatcaatgacaagccacttgatataatagcatgtgaaaatgcactatttgcaagtgatgtactaaaaaaagctatacttgatggtgcagatgaagagttgaaaaaatacttggaaaaaagtgttggatttccaaattgtacagttgataggattgtgccaaatgtggacatagaaaaagaattgcctatagatgtagcagtagaagatttttatgaatgggatatagaaaaaaataaggttaaaattaataacaagataattggtgcagaatatgttgaaaaattagacccttatcttgaaagaaagttattccttttaaatggtgcacatgctacaattgcatatttaggatatcttaaaggatataaatatatacatgaagctataaaagataaggaaattaataagattatagttggttttcatagcgaagcggtacaagctcttagtgaaaagcataaaatagatatacaaatcttaaaggaatattctaataaacttctaaagagatttgaaaatgaatacttaaaggacgatgtaagtcgtgtaggtagagatccgatgagaaaattatcgtctaatgatagattgataactcctttaaaattatgttgcgatttgaaaatagattttactaatatattatttggagttgcttctggatatctatttaattataaagaggatgaaaaagctcaaggaattcaaaacataataactaaagagggaattaaaaaagctatttcaaatgtatctcaaataaaagaaggagattatttgaataatatgatagcgtacaagtatgaggagctaaaaaagcaaaattaaaatttggaatattcataatcttcaaaatattattgctctaattgttttttaagaattgaattcgatttattttagggggggaaatatttattaaaataatttatataatttgctatttggtataattatgtaaatatattaaaaatattttcctcattttattaaacttaatacatatacttgcataatatattttatgtataaaagtaaaaaaaatcaataaatgtgtttttataatcattgacaggctaataaaagtaatagtataatgacaatgtcttatagacaagtaaattgtagaggaggaaagtagtgttaaaattatagttaaagcgcccgaacttgagtgatatagttcatttaagttgacgaggatggggagaatcgaatcttcggcggatgccccacggtaccgcactaccgttagcggttggtaaaagcagaaagtgatttctgtcacaaagccaatctggtgttaaaacctattttgttaaaagcctaaaatcctttaaaaaagaggtcgttttaggtgtattaaagttaatttaaaaataagaagggaagatttttatgtgcggaatagttggatatagtggtaagaaagaggcatcttcaattttagttgagggattaagtaaacttgagtatagaggttacgactcagcaggagttgccatattaaacgatggaaaaattaatgtttcaaaatgtaaaggaagacttgtaaatcttgaaaataaattagaagagaatcctatcgcgggaaatattggaattggacatacaagatgggcaacacatggagaaccatcagatttaaatgcacatcctcatagtaataaagataatacaataagcgttgttcacaatggaataatagaaaattacatgcaattaagaacatggcttaaatcaaagggatatgaattcaaatctgaaactgatacagaggttatacctaatcttgtggactatttttatgaaggtaacttattagatgcagttataaaggcaatatctaaggtagaaggaagctatgcacttggaatagtttcatcaaaagaacctgataaggtagtagcagtaagaaaagatagcccgcttatagttggtattagtgaagatggaaacttcatagcatcagatgttccagctatattaaatcatactagagatatatattatataaaagataaagagttcgtagttttaacttctgaaggagtagaattctactctaatgagggagaaaaaatagaaaaagaacttaatcatatagaatgggatgctaatgctgctgaaaaaggcggatatgagcacttcatgttaaaagaaatatatgaacaacctaaagcaataagagatactatgacttctagaattatagcaggtcaaccaataaaattggacgatatcagcataacaaaggagcaaatagagaatattgataaaatatatatagtagcttgtggaacggcttatcatgcaggagtagttggtaaatacgttatagaaaaatttgcaagaatacctgttgaggttgatatagcatctgaatttagatacagagatccaataattacgaaaaacactttgatgatagtattaagtcaatctggagaaactgctgatactttagcggctttaagagaagctaagtcaataggagcaagagttattgccgtgacaaatgtagttggaagctcagttgctagagcagccgatgatatattatatacttgggcaggaccagaaattgcagttgcatctacaaaggcatatactacacagcttataacaatgtatattttaggattgttctttgcacaaaacaaaaacactttaactaatgaagagatagagaaaattaaggcagatatgcttacacttccagaaaaggcagaagaggtattagcaagcaaggagaaagttcaaaaatttgcagcaaacacttatatgcataaagatatgttctacttaggtagaggaattgattatgcagtagctatggaaggtgcattaaagcttaaagaaatttcttatatacacgctgaggcttatgcaggaggagaattaaagcatggtactatagctctaatcgaggaaggtactgttgtagtagctcttggaactcaaagtgatatatatgataaaatggtaagtaatattaaggaagtaacaacaagaggtgctaaagttcttggaattgctgcagaaggcagaaaaggaatggaagaagttgttgattcagtaatatatgtacctgaagtgaatgatatgcttttacctgtactttcagtaatgcaattacaattattagcatactatgtttcagtggaaaaaggctgtgacgttgataagccaagaaatttagcaaaatcagttactgttgaataagagcaacttatatagaaaagatatgtagttttataacaaagttgtatcgtttagaataaagtttgaataaaaaataaaaggaatattatacatgataagtgtattatatgacaaaatttaataaataatatggcgaagtcgcatattcttgatttaatgagagtatgcgactttctatttatttgtatagataatgctagacttttgacaaaatgctcttccaatatttgcaagtaaatgatactattatattatgaggttaattcggacttgtaagatattgtagagtaagggatgtttgtatagtatatagataaatagtaatttgtatggatattagaaagattaaaaaagttagaatatggaggtctattatgaaaaaatggtatgatgaggagtatgaatgggaaatcgaggttataggatttcttcgtagtgaccatactgagagatattgccgaaatggtgaggaaattggagataagtatacctgcacctatggctgtcctgtaaatgctgatggacaaggtatttgttctaaagctatgatgattatgtttccaataatggaggcagtcagaagtggcggtgatttagagaatatcggtggaactagtaaatatagcaaggatattgtatgcccagatggttgtgttatatttaggcttacggcaaaaaaacttggaaatgagaatttttataagggaaagttttttgagtagtatgattcttatttcattcagattaagataagtccaaatgtacaaattctaatttggcaccataaataataatttgtaaagttacagtaacataatcttaacttcaattatgtcgaatctttttatataaagaaccaaaatataaaatcaatatttttttaagagtagctatcctgctttattagcaaatgtttgaaaatttaatactgtgatatttacaaaatataatataattaactggaagataaattgtaatttacaggaggaaatatgatgaattatagaaaagcagatatgaaagacatatctttacttgtgagtattagaaagaggcaactcattgatgaaggtatagagcctaatattgatattgataaggaattgacgagatattttaataacaaactggctaataatttattggttgaatggattgcagaagagaataaccaaattatagctacagctgctattgcatttattgattttccaccaacatatactaataaaactggaagaaaaggttatataactaatatgtatacagaaccgacttctcgtggtaatggtatagctacaggaatgttagatagattagtaaatgaagcaaaggaacgaaacattcataagatttgtttagtagcatcaaaacttggaagacctgtctataaaaaatatggatttcaagatacagatgaatggttggaattgaatttataagtgtaaattccaatttaaaaagtgaatagtattcttataaaacgtcacaactagtataaaaactaaacatttatttgaacactgcattattcagaaataaattttgtggtgtttttagtttgtaactcaagcataatgtcgtgtgattttttaaaagtttgatcaaactttattataaaaatttaatgtgttaaattttaaaaatctgtagttttgatcaaactttttttcaaaacaaacactaaatgtgtgatgttattataagtagttgtatttaatatacagattgcgtgatgcacctaacccagcaaacaagcataatccggaagcaccgattaagacaataagtggtaaatgccagttgttggctgcatcatgtagaaaaccaaaaagcatcggaccaaaagcagcgagtaggtagccgactgactgtgccatgccggacagtcttgccgcttcatctgcatttcttgtacgagaactaaaaaatatcatagctaggcaaaaagtaagtgttcctccaatgcccaacataatcatccataggaatgtaagctctgtccattctaaggatatgcccaaaagtcccaccaaaacacatagagaggcagtaataactaatggacgttgattggctttgcgttcagcaaggacagagcctaaaaacgatgtagggagcgataccaattgataaagggagagcatccatcctgctttgtttgaattcataccctgctggattaaaatagccggtaaccatgcaaccatgcaatagagtagcatagactgtaatcccatatatactgttacctgccatgccaaagtagatttccatagattaaccttgttaatcgcatttccgttaatactctctatttcattttttccttcatggatgtcttttacttttgttttaatgtcattatcgatcgtttttttaacaatagacatttcttgctttctacgtattatttgaggtatccagatgataattgataagaaactaagtgcagcccaaatgcttaacgctccgctccatcccaatcttgattcttctgcaacagggacactgataccggaggctatcgcccctaaaaggcccatagaagcagtatagatgccagttatcacgccgacccgtttagaaaattcatgtttgattagactgggtattagcacattgccgacagaaattgataatcccaggatcaatgttccaagaaatagtcccacccctccaaacaatgaacgtaatataattccgaaagtcagaaaaataagtgaccaaaacagcaccaatttagtgccaaattttcgcgccagtcgtggagcgaaaggtgagaatcctgcaaaagcgaataatggaagggttgtaatcatacctgctaatgtatttgaaatatgtaagctaccacgaatttcattgaccaacgggccaaccgctgttaaaggtgagcgcaaatttgctgcaataaatgcaattccgattatcagcattataggcgcatttctttttgaatacaggttctttttgtgttcgttatataattgattcatttgtatagtctctccttaaaatgtaatacgctcttttttacataaattataggcaaaagatgtatggatgctatacacttgaatacaattggttattcattctgcctctttaagagtttattaatagtattttacgtttataattttgctcactcacttcaatattatcagaactcatatatagctttgatgattttttacttttgatgatagtacctcctaatttaattatactaaaaatgtgtatagcaaccatacacttggatacaattgtgtattcatcttgcttttttaagagttcatcaattttattatttattaaaagaattggctggcggagatattaggtattcatatggataaaaaccaaatggaacgaatgaggctaaagaattatagataacccataaagccctttcattagcttcaagtatttgtttataccttcgctcactcactttactattatcagaagacatatatggctttgatgatttttttcttttgatattaacacctcctaacctaattatactaaaaatgtgtatagcaaccatacacttgcgtaaaatttttattcatcaaaatttttattgaaaaattcaactttgtttatcagggtcgacaaaaagtttgataaaaactccaattcatgttcggaggcattttgtagttcctcttcaaccatattatttataatagaatgatagagcatatggttgctatgagcttttttacctttttcagttagacttaatgaatatctagataaattaagactatcaatttcttttataaccagagcctttctctctagctttttgagaatttcggaaacagccccttttgttactcctaaaatatcggccagtccaccaacatgaatgccaggatgctcggcaatggcctttattacatgtatttcagagtgaaaaatcggtacatccgttccgaagtagcgagtctttttatcaaggtcagtcaaggcaaatgctaaattcagagaattatatgcaatttcatgtttattatttataattttatccatgtcaatagtatatggttgctatacgcttttgtcaagtcattattaaatcaattttcttatatagtgatgagagatattatagtggggggaaaggttaaaaaactgcttttgcaaagtaacactctctttatttaaagcatatgaaaacagccttggaaaatggagttgttgttcaatattttctgacaccgttttatttcggaacagttgccattttatgaagtgtactattaacataattatgcttagaagatttaattattttaaatttaattcttttagtacataattaacaaaaaatatgaatactcgtataattattattgtataaattattaaataaagtgattaaaaaaagcataagatcacaaaattatgtgtttaagggtaatcaaagtggtgaatatataaagcataatattgaggagtatataaaattttatgcgggtgttaaataaaagaaggtgaaaaattataattattagagaggcaaaaattaaagacgttaataatattgctaaggttcatgttgacacatggaatacaacctattctgatttcattccaaaggaggagctcaaatgccgtacttatgagtggcaagctaacaaatggatggatagaatgtttaataatattaccaaagaatttatgtatgtagcagaaaacagtcaaggagagataataggctttgcttcaggtgagacaaataaaatagaagaaaagtatgacagtattttgtacacaatctatattttaaagaattatcaaaggcaaggggtaggcaaaaggctatttaaggttgtagcagataggctcaggagtgaaggtgcagaaaatatggtggtttggacttttaatgaaaataagtctcgaggtttttatgagcgattaggaggaagcttagttgataaaaagaagatttttaaggataaaaccgaactagaggaggttgcttatattttttatttataattgaaaggtagaggaaatttatatttaaaagaagcacaaagaattattaaacaaaataatacgacaagtacttttaattttaaagattaatctggtgaggggacaataaaaaatctatatggctagcaatgtttatgtactttattctgcactgtagatttagtatagagaactctaaaatgatgtatacaattagtggcaataaaactctattacggcatgtataaaagtataaatataaatgtatgttttttattagagtaaaatatatacttaaatagtaattttgttatataattagatatagagcaaatttaataatggaagtaggggaagaatgacaataattgaaaacgctatcattaagtattgaagaagagtttacatgaacgggggatttagggtgaaaaatataataactgcgaaaaatattattaaagtatatggcgataaggataaggcaagagttttgaataatgttaatcttgaggttaatgaaggggattttatatgtataatgggtccatcaggatcaggaaaatccacattcttaaatatattatcaacagtggataggcctacaaaaggagtggtcaagattaataatcaaaatgtgtatggaatggtagagttgaggttaggacagctcaggtatgaaaatataggatttgtattccaagattttaatcttatagattctatgacgataagagaaaatatatcaataccgttagttttagcaagtattaaggcaaaggagattaaagaaaaaacagatgaaattgcaacgaagctatctatctttgacacactagagaaatttccaaatgaatgttcaggtggacaaaaacagagagctgcagcggcaagggcgttaattacaaatccaaagataattgttgcagatgaaccaacaggaagtttggatacaaagaattcacatgagctattaaagatttttgaagagcgcaataaagaaagaggaactgctattttaatggttacgcatgatgcaatgattgcaagctatgcaaaaaaacttatatttttaagagacggcaaaattgatgagcagcttgaaagaggaagtttaagtcaaaaagaatttttttataaaattgtcgacataacctctaaggagtctcaaagcttatttgataaaatgtaatagtaaaggtggatttaagatgggtgcgtatatttttgctttcaaaatgctaaaaaagaacactaaaaagaatctaatatatttaatatctataatatttaccatggcaattgtatttaatcttttaaatgtgattaataatactaattttttcgctgcggaggtaactggtggaaagaatgatatagcagcagatataatatttttactggtattgcttatgtgtatatttaccttctatgcaaattcatattttattatgggaaagtcaaaggagatggcgatagctgaactaagtggtatatggcctgggaaactatccagaatgcttctctttcaaaatgccattattgagataataggatgtgctctgggaatattaattggtatgttactaatgcctatttttctttcaataatgtataccataatgggtaagacaggtggtttgtgggtaatatccaattattcaattgggggaactatagctattttatttttgcagcttgtgtatgtcactattggtgattacagctacacatcaactcgagaagttattgatttgttagaatcagaaaaaagatctcgccctaaggaaaaaaggtatttatccattgcagaaattattgaaataataggtatgaagaagaaaacttcacattacaaaattaaaattttaaatgaagacatagatttatgtttaattagttattttatccctgttatatttttatttatatgtccaaggtatattcctatgtctattgctcagatatttattattcttcttagcgtttacagtatagagggaattctaagacattcaattccggaaaaaatattaaaactaaagaaggagaagtattcggatgataaaataaagttaatagcgttgagtaatgtttatgtgtctttaaaaaatttaaagtttttgctcataacgttagttattagtatagagggaattttattagctataacgatgtttaattctctaagggtaaaaacaatttgtttattttcatatgttacagtaatagtacttatagatataagtatcttttacaagattattatggaggcagatactaaaaatcatatattcaatcaattggcgctgataggatatacaacggagcaaattagggaaatagtaaagcaagaatttagaatatattatggaataattataacgcttcctttatttcacgtaataatattttttattttacttttaaagattggcatggtatcttttgatactcttttaataatgctctttatatatctagggatattctttattacgggtattggttgctattatttatacagaaagctaatacttaggaaaaatatatttagatttttatgatataagaattcttttaaataataaccgctaagaagaggctaagctctccttagcggttattatttacttattttatcagcaatgcaagacgcagcataagaataaggtttaatttgatatttatatccttcaccagttatccaacctgtaatttcattaataagaggataggttttgccttttctgttacttcctatgtcagcatgaatctcgatgtcctcctgtatattagcttctgcaaaagcatgagacaccttagaggctaactcaagacttaatgctgtttcatagtatatcttttgtcttacatttgagattttgtgaacatgtttaatatcatagaagaaaattccaccacttccgattctatggatagcaactaccactacgacttttgttaggtttttattttgagaatcggttcctatggtgattttataattgcaattattgtcttttagtataaactcctttatgcgcgataccatttcgtctatagaaacatcaccaaaagttttactatgcataattttacctcctagactaagagtaaatcattatagtttattttaagcaattctcataaaattattatatttccctatacttttatagtatgatagtttaaatatcagagtgtttatatggtatcttttacattaaaattgactgggttttaatatataatatatattatataaagaaattaatataagttaaggagaagttaaaatgagtaaagttactttttattttatgagacatggtgagacaataataaatagggctggaagagtacaaggatggtgtgatggagtacttacagatgaaggaattagagtagcagaatatgcgggagagggacttagtgatattgaatttaaagcattttacagtagtgatttagggagggctataaaaactgcaagaattgtacttggcaaaaataaaagaagtgaaaatgctgaattaaaggaagtacctgaattgagggaggtatattgtggaaagtatgagggggaatttgagaaggtaatgtttagtgacatactgaagtatttaaaggtagagtctattgaagaagcactaagaaaagttcctaattttgaaagagcttatgtagatagttgtgccgcaatggacgagactaatgaagcagaggattatgatattttgtctaaaagaatcaataaagctattaccgatataggagaagagacttcaaaaaatggaggaggaaatgtcttagtagtagtacatgggggaatgcttagggttttacttagaaatttagggtacaagcaacatatacataatatggagaactgtagtatttctactgttcaatatcaagaggggaaatttagaattttatctataaatgataatagctataaaagaaggggaaaggaaatgtaattttaattaaacatataatgcaataatgaaaaatatatatagagggagtaatgaaaaggacttctgtaaaatgaaaaggctattattagatttaatttcaagatttaatgaggatgatgttccagcactgggatctcaattggcgtattacctggtcttgtcatttttcccatttataatttttattatgacacttataggatatacctctttaaataataaggaaatactaatggttttgagtaggataatgccggaaagtgcatttaatcttatacatgctgcagttgcggaggtgattagtacaaagcatagtcagcttatgtccttaagtttagtactcactatatggtctgcttctgcaggatttacagctgtcataaaaggattgaataaagcttatggagttcaagaggcaagaaactttattaaggttagatttgtttcaatactttgtactattggagtggcgtttataatactaaccatgatgtttttattgatactaggacgtattatattgaactacttagcatataaattaggtttctcacataaagtaatcgccgtatgggaagctgttaggtatttgatattcgtatctacggctatatttatttttacagcactttacaggtatgccccatgcaaaaagctcatgtggatagaagtacttccaggttctttattttcaactttaaatttaatattagcatcatttggatttgcatactatgtaaataactttgcgaattactcagttatctacggcagcataggagcaataataattctgttaacctggctatttttagtggccgttattgtgatacttggaggagaaataaatgcggtattatctcaagatataaacattgatagagagaattgatatacaaaaaagagagtgtggcaaaatgattaaattttaatcattttgccacactctcttttttactacacattgaaagttattactaaagtaacatataaagttagtactaaagtgaatattaaaacaaatttctaagaagtattatataactatagagaatgggaggcgttaagatgctagaattaactaatataacaaaaaagtatggagattttacagctgtaaataatatttcttttaaaattgaagatggtgaagtatttggacttttagggcctaatggcgcaggaaaatccactatagtatcaatgataagtactgtgatatcaccaacaagtggagatattacagttgataataaattattaagacaaaagcctacggaaataaagaaagtaatgggtatagtccctcaagatatagctttatacgaatctctaagtgcaaaagataacttagaattctttgggtgtctatatggattgaatggaaaagagctaaaagaaagagttaatgaagttttaaaaataatagaacttgaagacaaaaaagatcaagctgttgaagaattttcaggtggaatgaaaaggagagttaatataggtgttgcattgatgaataatcccaaacttctaattctagacgaaccaacagttgggatagatccacaatcaagaaatcatatattagaaacagttaagaaattgaataaggaaagaggaatgacagtaatttatacaagtcattatatggaggaagtcgagtatctttgcaaaagaatcgctattgtagaccatggaaaactaatagcactaggaactaaagatgaattaaaggaaaaatcaaaagcaaaggatacacttacagttatatatagtaacggagataaaggagctttggacaaaattaaaagtattaatggaatagaaaatgtttcaataagtaataatcagatatcgatgttagttgatcagcataaaagaaatattatagatattgttgaagatgtaagaaatttaggtgttaaattaacaagctttaagtatgaagaggttaatttggaaagtatttttttacaaattacaggtaaatcgctaagagactaattgggaatggaggataaaggttatgaataagttgttacacctatttttattagatacaaaactcttactaaaatcaaaagtattttatcttaaattagtactgtttccaattgctattattttaataattggggcgattaatggtaagaatgaaaatacattaaaggtgttcaatgtagcatattacagtgcagatacaggttatcaaagtttaaatgtatctaaaaatttaagtgataatgtatttgaaaataaggatattaaaaagataataaatttgaaaaaagttagaagctatgctgaagctaaagaacttgtaagcaatggaacagcttctgctcttgtatatgttccaacaaattttacaaaagactatttaaatggtaataatgttgaaattagtgttgttggagataacaataagattaatgatgtttcaatagtaaaaacaattgtaaatagtttcaatgagaatatatctacaattagagcagaacaaaatgaagttgaagctgaagtgaaaaataaggcttttttaaagcaagtagatattgataaattgataaaatctatagagaatactaatggcatatcggctaagatttctaaggtcgcttcaaaaagtggcgttaaacctttaaatataatgcaatatgaaatttttgcaatggtagtaatgttctctataataacagcatttgagcttacacagaatatagtaagtgataagctaaataatactatgaatagaataaaatctacatcaacatcaaattttcaatatatattaagtaagataattggtatggtaatagcgataatagtacaaatggttacagtgatggtgataagtagtgtggtttttagagtgaagtatgataatataccaggaattatattaataactgttgtttatggttttgcaatagggagtatagtagtctgtgctggattatttgcgaaagatcatatggcagtttcaagtgttatgtcgccaattgtatggggatttagttttcttggtggaagcttatttgataaaaataattttcctgatgttcttgcatgcattcaaagaataattccaaatggaaaagcaattaattgttatcttgaagtttgtgaggggaatagtattggttttatatataaagatcttcttgaattattagggatatcagtggtctttgtactcatagctttaatgttatcaagtaaagataaaaggattaggcttgtaaataataatagaaatactttggtaaatagtacgttaattaaataatattgagaggacggtaaaaatgcatatattaagtatgataaagagtcaattaaaacttttatttaataatagactagctgtttttgctataatattagccccaattttgcttacgtttttagtgtcatattcaagtagtagtaatagtaaaacaaatgtctattttgcagatcaagacaatactgaagcctcaagacaattagtgaatatgctaaaaaataatcatgacttaaatttaataagttcatctgaaagtgagataaaaaataaggtcgatgatgacaatattacagtcggagttttaataaataaaggattcggttataaattacaaaataataaagctttagatatcactcttattgaggactatgatagtgtcgatggagaaaagctttcagatattattttatctactgagaatacactacaaaaagttaatttggattctaaaagtatttcaagggtactgagtagcaatgagagtagtatatcaaataagattataaaaaaaataaataatggaagcggtgttaagctcttatataaaaatttaaaaagtagtcagaatgtagaggataaaaatgcacaaaatttaattggattcctactgatgtttttatggtttattgtaattcagggatttagaactctaatagaagaaaaagaaaataacacgttcaatagaataaaagggacaccaacaaattacagcaagtatttgttaagcaaaatcatagcaaattatatatttggaatgataattatagctataatactgatagtgggaaagtatggattaaaatctaaaataattaacaatgttggtccagaaatagccatactatctatatatttatttagcatagttggactagtaatgatatttgttccttttgtaaaaaagcatcagacatttactataataggggcagcaataatggttttaacaggattgctaggaggtagctttttttctatggatgagctgcaattgcctaaagcaattgaaattatatcaaagtttatgccagagacttggggaataaagtcacttaaagaggttgtatttaataatttgtctttgggatctcaaagtcaaactatacttgttttagggattgcaggtatagttggactattgatatctacaataatagtaaaaattatagacagaactgaaaaaaatttttgagaaatagggggagtggttgttatgagtattaccttacttacaggcattggagaaatatttttgggtatattgttgaatgtatttataggcaagatagtaaagattgtatttaaaaaggatggtacgctaccaagagtacctgtaagatttattgggataactcttattcttaatggagtaggaaacatggttcatttataagaataaattaattttttaaagtacaaaggaattttaacttcttctctgttatagttagatatatttcaaagaagaagtttttgtgcttgatgggaatatgacaaaatttaatgtaagtcagtgaacatatttggtataataaagaaaaatgtgtacaagggaggagtctttatgaagtttaatttacacaagagggataagctttcaaattttgtattaatgcaaaatattttagctttaataattcttgataattttataagagagtcttcgcaaataataaatattatactagtgctttttttgataatagataattgcttaatgataatgtataacaataagctaaaatatattatcttttctataaataatttaatagtaggatatctttattttggtagcaattccaagggaataatggtgtactattatacactaataatatacattgttgcagtgaaagataaaaaatttaaaggtttgcttatactaaatttcgtcacatatctttttgcaaatagattattttcttcaaaattgttaaattatcattctgttttaaatgtgatattcgattacggagttaacgtggtaatttattttttaatcaggattattattatagaaaaatcaaattcaaaaaagcttaatcaaaagcttaatgccactaaagaaaactatctagataaaataagagagctagctataaaaaacgaaagaaccaaaatagcagaagagttacacgattctataggacattccttagttgctttgaatatgaatttagaatatgcagaaaatattattgatgttgattctaaaaaagccagtactactattaaaaattgttatatgttatctaaggattgcattaagactttaagagaagcagttactattcttagagatattgatattactattattaatcttaaagaagatatcgaaaaaatgttttctaagtttgaaaatacacaaaaatgcaaattgagtttaaatcttagtgaagatattgaaagtatttctgccgaaattaaaagttgtgtttttaaaactttaagggagtcaattactaatggtataaagcatgggaaggcaacttatttcaaggtggatattttcagggagtttggcaatgtaattatgaatatagaaaataacggggaaaaatgtgaggaaatagttccttcaaatggaatcataggcatgaaaaatagggtgcatttacttaaaggtgaaatatcatttattccaaatagtacatgtggatttactgtaaaagtaaaaaataccaagtgatgaagggggtcaacacaaattaaattcgtaagtattaaagtatagtgtttatatcaccttgtagcttataaataattctgcagatataaaataagttcacttcgattacctaattcaagcttttcaagtattttagaaacataattttttatagtaccttcggttaaaaataaagcttctgcaatagctctattactttttccttttagaacgtgatttgcaacgtccatttctctaggtgtaagtaaatgaagaaggtttttttcttgtaatggtttctttttatctagagtatttagtgcatttacaagttttaaagttacttgaggatttaaaagaacgcttccttcacaagctgcttttattgaattgaaaatctcctttgaacctgcatctttcagaacatatccatcagctccattcttaagaacatcaaatataaattcatcttcattaaaggttgtgagaattattacttttaaatcgggataattctctttaacaagtctagttgcttctataccgtccattacaggcattcttatatccattaatataacattaggggattgatgttcaagtaaggttaatagttctgcaccattagatgcttcacctataacattaaattcgttattaagacctaatatcattttaagaccttctcttacaatttcttgatcatcaacaattataacgtctatcataatgttacctccaaatttcaatttgttacaagtttagtttaataagtggatatctagaatttaaataaataacaaaaataagacctaaatattctatcttgttgatgatagaatatccatattatagtactgtagaataaatagtattttagttataattataccattataatacactaatgttaaagcatacttaagatgacttaatagtgtttgttttttatctagattattttcgcattatagattattaaagtatattttatataatagttttattacaattgtaatattataaaaagagagttttatatcttgtatataggtaaataaataagctttaataataaattatcaataaaagcctgcttatattagcataagaataaaaacagcacagatattttaagaaaagtgttgataatttattccataaatgttagtataagtatgaaataaagttttaaaaattctatacatgaatattttgaggtgtaaaatgaattcacatttggaagaccttactacagaaaaagtaaatgatgacactgtaaacattgatgttatgaatacagaagatatgcttaaagctataaataatgaggatataaaggtggcctatgcggttcaaaaggaaattcacaatatagtcaaagctgtagatattgtaagtgaaaaattaaagaataatggaagacttttttatattggagcaggcacaagtgggaggcttggggtattagatgcatcagaatgtccaccaacctatggtactaatcctgaattagtgcaaggtattatagccggaggaaatgaggcaattcttaaagctgttgagggtgctgaagatgatgaggacatgggaagaagtattataaaagaaagaaatatgacttcaaaggatgttgtaataggaataacggcgagtggtagaactccttttgtaattggtgctatgaaagaagcgagaaagaatgaaattatagcaataggaatcagcaataataagaattctttaataaataaaaatgtggatattaagataacacctattgtgggaccagaggtaataatgggttctactagaatgaaggcgggaacagcacaaaagcttgttcttaatatgataactactgcagtaatgataaagcttggaaaagtgtatggaaatcttatgattgaccttagtctgagtaataaaaaactaattgatagagcagtcagaataatagaacatgcaacaaaggtagaaaaagaaaaggctatggagtatttaaagagagcgaaccttaagcctaaggttgcaatagtaatgataaagacaaatacaaagagctatgaggcagaaagattgttaaatatggcagatgggtttgtaacaaaggctataaaattgggttctaaataataaatttctctataaatatgtaattaacaattaaaaattatggagggaagtaaatgaaaaggaaagtacttgctatattcgtaatcactgctatgttttctacaatactatttacgggatgtggttcagaaacagctaatgtaaaagataccgcagagcctaaaatagaaaacgttataaaagtgactagagctgtagataagactaaattacctgatgaagctaaaaatagaaaagatacattaataataggtacaggtgttcctggtggaaattttataagctattatgcccaaacacttacagatgcgtatattagtgatgttgttacagatgggttagtggattgggatgattctggagagccaattccggggatagctaaaaagtgggatatatcagatgatggattgacatatacttttcatttgagagatgacgttaagtttagtgatggaaagcctcttacagctgatgacgttaagttttcactagagctagtatttgatcctagcttctccggtgcagtagatcattcggcaataccgattaagggtggagatgcctttaataagggaacagtaaaggatattgagggaataaatgttaaagatccacatactatatcagttacgctaaataagcctaactcgtcaatattatatcttataggtacaactattatttcaaaagattactttggcaaggattatgtccctggaaatacgaaaggggtggaggcaaagcttcaaactcctgtaggatgtgggcagtataaggttactaagtatgttccaggtcaggaagtagatcttacagctaatgaatactactggaagggcacaccaaagattaaaaatttgatatttaaagccactactgaagaaaataaaatgcagaatttaagctctggagaaacggatatagacacttttgatggtacacctgaaaatatagaacaattaaaatcaatgggatttcttgatctaacctcatttccttcttcaagtattttctatataggagtaaattgcaaggattcaaagtttagtgacagaaaagttcgacaagctctagagtatggtttaaacaggcaagagatggcaaaaacagtttttaagggcaatgcttatataataaatgaaccacagtctaaggcacatgcatcttatcttaaggatgttaatgaatataaatacaatgtgtccaaggcaaataaaatgctcgatgaagctggatggaagaaaggtactgacgggataagagaaaagaatggacaaaagtttgtaattcatttaatgtcttcgtctactaactctgcccataagcttgaaatacctataattaaagagaattataaaaagcttggtatagatgttgaacctgagcttatggatctcaatactcttttaagtaaaacggataaaaaagattttgaagcatatttaatgggaacttccttaggtgcggatgcattatcatcaaacttagcggcaaactttaaaacaggtgctccaagtaataatatgtcttactcaaactcaaacgtagatgatttaatagataaggcttataaagaatcggataaggataaaaggacggctttagagcaaaaggtatataaagatataaatgaagacttaccatttatattcacttatcagccagaaacaatatgggtaaataattcaagagtgacaggaattaagtttttaccatataattctttttgccacaatatttataaagcagaaataaagtaacctatttattaacttatacatgtgtcataagctaaagatagaggcacatgtataagcctacatttttagtttacatagttagactttgttttaaagtatgcatattagataaggcatgaagttaaaaaggaggactatagatgttaagatatatagtgaaaagattgctgcaaatgattccaatattaataggtgtatcaattgttatatttataatattttcactggcaccaggagatatagttgataatatgggggtaaatagtcatatgacaacagctaaggcctctcaattaagacacctatatcatctagataaatctaagccacttcagtatttgtattggataaaggatgccgcttcgggtaattttggatattctcttgagtacaggcagccagtaagtactgttataaaaagctacatatggaattcgtttattctgtcatttatgtcttttatagcagcaatagttcttgcaataccaataggaattgtatctgctacaaaacaatattcagcttttgattctatttttacggtaatagctttaattggaatatcaataccagcgttttttatggggttactgcttataaaatggttttgtatagattttaagatatttccggtgtctggaatgactacatcaggaagcaatgcagcaggtataaaaaaatttggagatatattataccacatgtttttgccgtttttagttttaacctttgaaagtgttgcaagccttatgagatatatgagaaccagtatgcttgaggtcataagacaggattatataagaacagctagagcaaaagggcttaaggagaaggttgttatatataagcatgctttgagaaatagtctaattcctgtaataacaatattaggtatgtggcttccaggacttttctgtggggctataataacagagcaaatattttcatggcccggaattggaagggtaactcttcaggccgttagtcatagagattacccactgcttatgggatttaccatgctaattgcagtacttacgcttctcggaaatctagttgcagatgttgcttacgctgttgttgatcctagaattagacttgaacattaaggggtgatataatgggaaataaagtaaaagctatagataataaaaaaattataagccctacaaaaatggcgtggcatagattgaaaaaggataaactagccttggcgggactattcatagtattatttatgattatatttgcagttttaggacccgtagtatcgtgttatagcactgatactatggattatagtaatccaactataggaccaagcctccatcatttaatgggtacagatgaacttgggagagatatacttacaaggcttatgtatgcaggaagaatatctttggcagtaggggtagcagctgttgttgttgaaataattgttggaagtgcatttggcgctatcgctggattttatggtggaataatagacggcataattatgagaatagcagatatttttttatgtgtgcctttttttccaatactaattacaattgctgcactatttagtgatcttaagataaaatcgcagtttaaggttccatttttaatgttcataatcggaatactatcctggccaggtctgtgtcgtatcgtaagaggacaaatattgaccttaagggaacaggaatttatgcttgcggcaaatgccttaggaattaaggatagaaaaaagatatttaagcatcttcttccaaacactattccatctataattgtatcagcaactttaaatataggaagtgcaattttaacagaatcatctcttagttttttaggtcttggtgttgttcctccaactccatcttggggaaatatggttcaatccgtaagtgacctgtataagcttgaacactacccttggctttggatgcccgcaggaatatgtatactacttacggttatggctataaatcttttgggtgatggactaagagatgcattagatcctaaactaaagaaataggagggataaaaatgtcagaaactttgcttcaggtaaaaaatcttaaaacatactttcatacagaagagggaacggtaaaagctgtagatgatgtgagttttgaaatcaaagaaaaagaaacattagcaatagttggtgaatcagggtgcggtaaaagtattactgccatgtcaataatgaggcttattccaaatcctccaggaaaaatagagggaggagaaatactatttgacggaaaagaccttattaaaatgaggcaaagcgatattagggagatcagaggaaataaaatatcattaatattccaggagcctatgacatctttgaacccagtttttacagtaggagaacaaatagaagaagcacttatattacataaaaagatggataaaaagcaagctaaacgagaagctataaaaatgcttacgatggtgaggatacctagagcagaggaaatttataaggcgtatccacatgaacttagtggtggaatgagacaaagggttgttatagcaatggctatatcctgtagtccgagacttcttatagcagatgagcctacaactgctctagatgttacaattcaagcacaaatacttgatattatgagagagcttaaggaaaaggttaatacatctataattcttataacacatgatttagggattgttgcggaaatggcagattatgttgttgtaatgtatgcgggtaagatagttgaaaaggcacctgtaatcgagctttacaaaaatccaaaacatccttacactgtaggattattgaagtcaaaacctgttataaataggcttcaagataagctttattccattgaggggcaagtgcctaatccacttgatatgccagagggctgttacttcaacccaagatgtagtaaagcaaaagacatatgtagaaaaaagcaaccaaatctaaaaaaggtttcagaaggacacagcgtttcctgctggctttgtgaggaggtaaaatagatggaagaagctattttaaaggtacgaaaccttaaaaagtattttcctattaagacaggtttttttagaaagactacagggtatgtaaaaagtgtcgatgatgtatcctttgacattgctgaaaatgaaataatggggcttgttggtgaatctggatgtggcaagacaacaacaggaagaactctattaaggcttatggagaagactgaaggagaggttttatataggggtaaggatctttttagcttaaataaaaaaagcttaaggaatctaagaccagagattcaaatgatatttcaagatccttatagctcgttaaacccaagaatgactgtaggggaaatagttggagaagcgctattggatcataaattgtgtacaaaatcagaggttaattataaggtggaagagatgataactgcctgtggacttgcatcctatcatatgaggagattccctcacgaattttcaggagggcaaaggcagagaataggtatagcgcgtgctcttatattgaatcctaaatttatagtggcagacgagccagtatcagctttagatgtttctatacaagctcaagtcataaatctacttgccgaacttcaaaagaagaaggggttctcatgtttatttatatcacatgatttgagtgtggttcagcatatatgtcaaaagattggtgttatgtatcttggaagtatggttgaacttgcagggaatgaagaactttttacaaatccactgcatccatatacaaaagctcttctttcagcaattccgattccagaccctacgcttaaaagaaataggattattcttaaaggagatatcccaagtcctgcaaatccaccgagtggatgtaaatttcatacaaggtgcaattacgccacagagaaatgttcaaaggaggtacctgaatacaaggaagttataaaaggtcattttgtagcatgtcattcatgttaaggtggttttgttatgaaagaaaaattacctaaaaataaagagaaaatttatttcaaagattttttagcattatgtattgcatcctttcaaattctgttacctatctttataattgtgtttttgattttttcaatacttgcatttttagttgttaaagtgtgggtaaaataaggggaagtgaaagtaatgattatagatataaatagacttgatagagcatttgaccttataaaagaaggagtctctaagggagtttttcctggagcagtggcagcagtaggaacaagagaaagagtaataaggcttgagagctttggaaatagatgtctttatccagaaaagcttagtatgaataaagacacattgtttgatcttgcatctctaacgaaagttgtagctacaaatactctttttatgatttttttagagaaaggtcttatttctgtttatgataatgttagttactatttagaaaagtttaagggaaaaaataaagatgatgtaactatatttaatttattaacgcatactgctggatttgtaccttgtaaaccactatataagctctgtaaaggttatgaggactctatagactatatatgtaggtgtggactttcatacaagccgggtacaaaatgcgtttatagtgattttagctatattttattggcatacatccttgaaaaaataggaggggacacactagatattttgtgtgataggtatatttttaagccactttatatggaaaacacaacctttaagcctaaggggaataacatagcagcaacggaaatagataagaaaactaaaaagccgttaattggagtatgtcatgatgagaatggaagattttttggaggaatatcaggtcatgcaggtttgttttctgacatatacgatttgtgtaagttttctaatatgcttgtcaacgagggaaaaggcataatttcctatgcttcttttaaagcaatgacaactaaccatactcttggacttgaagataacagaggctacggctggtgcattaagggcgataaaaactcctttatgggagatatagcttttccggaaactttcggacacaatggtttcacgggaacctccctttgggtagatattaaaaataatatatatgcaattcttctgacaaacagggtgcacccaacaagggataatttaagaataataaggtttagaagggtatttagcaacgctgttttggcttcattaactagataacaggggtgatggttatgattgatgtaaaaaagcttcctcttgatataaaaataggacaaatgataatggcagggtttacttcaaagcattacgattcttctttggaaaaactgattacagatgataagataggaaatttcatattgttttcgagaaatatagaagagaaaaatcagctcacaaggcttacagaggatattcaaaaaggactagaaatcaatattaaaattccaggaattatttctgttgatcaagaaggtggaatggttacaagaataaattcagggactacaatatttcctggaaatatggcttttgcagcagcaaatcatccacatagcacttttagacagggaaaaattgagggagaagagcttagaggtttgggtgtaaatatgaatctagcaccagttatggatgtgaactgtaatcccagtaacccagttataggagttaggtcttatagtgatagtcctgaaaaagtagcagaactgggtttggaattaataaaaggtttaaaagaaagtaaggtagttccagttgcaaagcatttcccgggacatggagatacggatgtggattctcaccttagtttgcctgtagtaaagcattctattaaaaggcttcgtaaagtcgagcttcttccatttaagactgcaatagaaaatggaattgatgcaataatgtcagcacatgtgctctttccagaaatagaacccaaaaggcttcctgctacactttcatatagggttcttacagatttattaagaaataaaatgggttttaagggcattataataacagattgcatggagatgaaggctatagcagagttctatggcagtgataaggcagcagttatggcaattaaagcaggagcagatttaatttgtatatcccatagtgcggcggtacagaaagcttgtatacgtagaattaaagaagcagtaataaataaagaaatctctgaagagagaataaatgaatcagtaaaaagaattctagaaataaaagagaaatatagcatttcatttaatacagtcaaaagaaactatgatataaataatagtcttttcgcagaagaaataagtgataaaagcataacacttctaaagaacgataaaagtttaatcccacttaaaggaaggattgtatccatatctacaaaagcagtagcacttactggggctgaagataatatgagcctaaacaattctttttgtcataaattaaaagagaactttggtggcagtgaatttcaaataccaattaatccccataaagaaataatagataaaatattagaaaaatgcctagatgcagatagtatagtaataggtatttataatgcatacaatcatgaaggtcaaagaaaacttgtgaatgaaataagtaaggttaatcctaatatagtactggtatccttaaggaatccctatgattttttatattttaaggaagtttcagcttatataaatgcctatgaatacactaatttgtcagtaaaaagtgtaattaaagtattatcgggaagagtagaggctcaagggatttcaccagttagactttagaaggggagattatatgaagtatgttataggaatagacggtggtggaagtaaaactcatatgaaaatttcaactctcgattacaaagtgcttttagaagtatttaaggggccttcgaatataaattcttcaacaaaggaagaagtaaaaagggtacttcaggaactgataatggagggtttaggtaaattagggcaatcattagaagaatgttctgcaatatgtattggaactgcaggagcggataggacagaggataaaagtattatagaggatatgataaggtctttaggctatatgggcaaaattatagtagttaatgatgctgaaatagcccttgcaggaggtattgagaaaagagaaggaattatagttataagtggaacggggtctatctgttatggcagaaataaagaaggaagaagtgctcgctcaggtgggtggggacatattataggagatgagggaagtggttatgatataggtataaaggcaataaaagcagcccttaaaagctttgacaaaagaggagaaaaaacgattttagagggcgatattctagactttctaaagctaaaaagccatgaagatttgataaattatatatataggagtggcgtaacaaaaaaggaaatagccagcttaactagagtagtaaattctgcatatataaaaggtgatttagtttctaaaagaatacttaaagaggcagcaagagagctttttttaagtgttaaagctgtagtagaggttcttagtatgcagaacaagaaggtagtattaaccacagctggaggcgttattaataatattaactacttatatgatgagtttagaaagtttttaaatttgaattatcctaaggtaaagataatctctatgaaaaacgattctgcctttggtgctgtaattatagcaagaagtgagtgtgattaaatggaaattaaagagacatatgattttagtagcattgtagatttgtggaataaaaacataggtacagtgtatccgatgaatttagaactttttaagcaaaactatattaatgataggcaaagaaaaaaaataatgggtgcttttaatggtgaaatactaataggctttgttatatataaacagtggacatataaaagtggatctttaaagcccaaccataagataggatatataaattcaatcatagtggatataaactttaggcatcaagggataggaactaagttattagatgctgctgaagaggaattaatcaattcgggagttaaaatacttcgttgtggtagtgacacctatcacttttttcctggaatacctttagaatgtttaccttcggaagagttttttttagttagaggttataaaatgcaagactatttttatgatttaataggagatgtatctaaagtggattttaaaaaaccttctataaaagatggttttaaggttaatgtaatgaagccagaagataggaaggggctctttgaatttttagaaaaaagctttagtggaagatggcttgaagaatttattgaattttttcaggtaggaatgaaggaaagagatattgtacttataaagtataagacctctgttattgggttctcacatatatatgataacaaaagtagttttataggtccgcctatatattggaaagcattacttgggcataactacggtggtttaggacctatagggatagacaagacatatagaaaacaagggcttgggaggcttttgctatacgaatcactacagattttgaaaaaaagagaagttaagaaaatggttatagattggactgaaaaagatattataaatttttatggaaggtttaattttatgccttggaaagcatatagaaaagcaaccaaagaggtaaaagatggcaagggttaaaacaggaatagataatataaaagaatatatggacatttttaaaggaaaaagagtaggacttattactaatacaacgggatataatagtgagtttaaaagtactatagatgtattgagagaggaatgtgatttgcgagcattatattctcctgagcatggaataagaggtgaagttcaagcaggggataaggttacaaactatgtagactttagaactggaataattgtatacagtctttatggtgagagtagaagaccatcaaagaatatgcttaaagatattgatgttatcatttttgatattcaggatgttggagccagatgctatacctatctatataccatgtcgtatgctatggaaagctgtagagaatttgataaggaatttgtagttttggacagacctaaccccattaatggagaagaggtggaggggaatattttagatttaagatataaatcctttgttggacgttatcctatacctcagaggtatgggcttacaataggagaaacagcaagactttttaattctgagttttctataggatgcaagctaacagttgttcctattaagggatgggaaagagatatgtattacgaagatacgggattaagttggattatgccatcgcctaatatgccttcggttgatacagcattagtatatcctggtacatgtatttttgaggggacaaatatttcagaaggaaggggcacaactaagccttttgaaattatcggtgcaccttggctagatggagttaaaattgcagataaaatgaatgcatttggactagatggggtaaaattcagaccaatagcttttagacctacattttcaaagtactcaggtgagctctgcttaggagtacaaatccatgttatagacagaaagctatacaaaccggttaaaactggactttttctttatgaaattataaaaggagaaagtaaagataaatttcaattcactattgtaaatggcgatagaataaaatatggtattgattttttaattggtaatagtgttattagaaaaactgagcatggtgtaagaaatataattatgaaatggcaaaatgaagctgaaggttttgaaaaattaaaaaataaatatcacttgtatccataattctcacgtttatataaaacagttggagttcatggacttttttaagatatgaagactataaatatggagtccattaactccaaatacttttagcaatatctttatgaggagagtaagtattaccatggtatgcatggtgcaccagataaaatgtaggaactattagtgaagactatacataagaacagtacacctaaagttaacacagagattaaaaacctatgcttctttaacacagttatcacatcctttcttaaacaaagtttttagtgaaactatatatttctttaagtgattgaatatcgtctatttctaagtaaaagcccaatagcttatacataatggcaaggtttatagaattatcttttcctgtaagtataaaaaattgactctttatatatgctattccatcaagattattttgtgttttgtagacctctactaactcacataatatgtctttaattaaataataatgtgtatacttttttgaaagctcaagtgattttagaaaatatttttctgaagtatcaaaagcttttagtcttttaaagattttaccgatttcaaagtaaaatctaggcatattcttataattttcatcaatataaactatatactccattatcttattagaagtttcacgtgctttatcatattcacctaaattcaagtagatttcagatatattaataaagctaagtacgtatttatcatagcttttctcgtcaatagatttaaggaccttattgtataaagttaaactttcctcatatttgccaatgtattggagacaaagagatttttgaagtaaaacctgatagtatttatccgtatttgtattttttattgttttttcaagtttatttaaatttctaatagctttgtcatattctttaagctctgtataacagagagcactattgaacaaaaatatgcaaaaatattcttcgctcatatggtcaaatcgatccatagcaaactcgcaacattttatattgtactcgtattttcccatatagaagtagaccatggagagttttcttagtatagaaagcatgtgattgtcatgtatgtctaaatcagctaaagccttagctttttcatagtaaatagagctgttataaaaatcgtcaatactacaaaagtaatcacctgcaagctcgaagattataatttttttgtcaatgaagttccaggttgataaaaacttttcgacttctgtcaatttggttgagaagcttgtgtctttatatacagttaaatccttaagttcttttatatactcattgagaatcttattagcttgatctttttcatcttcaataagataagctaattctacttctacagaaatatttcttgtattgcaaattttctgtaaattcttaaaaataacttgcgcagcttttttagttaatttggctttattatgctctatttgacttataagatttcttgttatctcagctcccgctaattcctcttgttttaatccatatttctttctaatggttttgagtttttcgccggaggatattattttataactttccataaaaaacccactcctaatggtacaaagtatgttgttatggtaattgtagcaccaatgcatttatatgtaaaaccagttatttaacatatttcacactagaaataagcttttaaagaagtatgttatttaaagtcttaattttatgatattcctaaggggattgccataaaccataaatattacataaaaatagacataatattataaaaaatccaacatagtgtgatgttggatttttttaaagtagtctacaacatttttgcagcggctttatcaattattattgtagtatcattgtgaagttggagaattgaagcaggtacttcaggtgatatttttccattaaccattttaaatattgcttcagcctttttttcgccgtttgctaaaagtaatatctttttagactgcattattgtctttattcccatacttagagcagaggttggaacttcattttttgagttaaagaatcttgaatttgcttctatagttttttcatctaattttacaagatgagttttagcttcgaaattaatgtctggttcattaaaacctatatggccattttcaccaatacctaggacttgaatatctattccgccagaagataaaattttattatcatagcttttgcactcattttcaatgtcagatgtagttccatccagtatatttatgttctcattttttatatttgtgaatttaaagaaattatttttcatgtaatagtgatagctttgagggttatcatcagaaactccatagtattcatcaagattaaaggtctgtaccttggaaaagtttagattctctttattatataaatttatcagttctttatacattcctagaggagtgcctccagtagctaatccaagaacactattttccttcaaaattatctgacttgcaattattttagctgcaaatttactcatttcatcataatcattaacagttactattttcaattatatctcctcctatgattgtaagtttaatttcaaaagcatcattaaatatagttatatctgaatccttaccattatttaaacttccctttttatcaaatacatttatattttttgctggatttatagtggcaagttttactgcttcgttaagttttaaatctgtattttcatatacattttttatggctttatttaaagttaatatacttccggctaaagttccgttctcaagtcttgcagaatcatctttaactatgactttctgtccgccaagttctgaaactccatcacctaaacctcccgctctcatacaatcagttattagggttatattgttagtaccgattgtttttataagaatcttgtatatatcaggatgaagatgaattttatctgctattatttcagatggaatattattgttaaatatagcgcctattacgcctaaatttctgtgagttaaaggtgtcattgcgttaaacatatgagtaacatgatttattccatttttaattgcatttacagcttcgtcataggaggcatttgagtgacctattgataaaactatatctgaattctttttaacagtttttatgaattcgagattttcatcctcttcaggtgctaaagttattatctttataatatctatatagtccttaataaaatcataatcaggctttaatatgtgagttttagcttgcgcacccttaaatttttcgcttataaaaggaccttcaagatgggcacctagaatattagcaccacctaagcactttgtactcgcttctcttatagtatctaaggcagtataaattttttgtctgtccattgtcatggtagttggtaggaaagatgtaacaccattttttgttatatctctacttatggttttaagagcatcgagggttccatccatagtatctgcaccactgaaaccatgtatatgaacatctataaaaccaggagaaacgtagttgccttctgcatctattacataagttgttttcctatcaaggtttttttcatctacaatatctattattttttcatcaaatagtaaaactttattttcaagtatgctatcttcggtaattatttttccgttaattatagctttcatactttcacttcctctaagttaatattacttcatatttatatttttcacttctatatattgattttgtgtattcaataggaactccatcctttctataggtgagtcttcgaaaaagaagggctaaggaattacctacttgatttaagaattttgcctcatagtctgttagcatgataggttcaatagtttgttttgcctttgtaggctcatagccatatttctctctaaaggtattgtatagagatttcccatcaataacttcttttgtcatatcactaaataaatacaagggaagtacaacagtttctattgcagagggatcattatctgttaatctaagacgtattatttctataactttcattttcttatgtggaagttccaataaggtgcttatatgttttgtggcagtttttatttcaaaggatagtatttttgtacttatgtttaggcccttttccctcatttcttcagtaaaactctttagctttgtcagttgttgtttctccttttttttggctacaaaggttcccttaccttgctccctatagagaataccttcagacactaatgatagaattgctttatttacagtcattctacttattttctggatttcacaaagttctctttcagtaggaatagtatctccaggaagcaattcttcattttcgatcatttcctgtaaaatcatcttgagctgataatgaagaggaagaggacttgattttgatactatcttcaaattattcagtccttcctataataaacttttatttacaagtctattgtatcatcatattgacatgttgtatataccaatttaaaataaatttaaacttatgctatgaaatcatgaatttctttggatattttacctatagtatcttttgcctcataattaaattgtacactcctaacaaatactcccagtatatattcagcgttttctgttctaaatattccaatatcatggtttaagtgaggtaaatcacctgttttatgagcacatctaatatcgtcacataaatatcttaataaaacctcacaatcagtgttgttacttagaatctttagcattaaatcacacatatcagggcttaatattttcttattatatattttactgaatagtgttaacatgtcaaaagcagtggttatgttctctctgccttcttttgcagcattggaatccatcatttttcttcttaatagagtggtttttaatccgatttttttaccgtagttatttatgctatccattgttaaaagatctattaatatgtttgaagcagtgttatcactggatattatcatgagagttaaaaggtctataagtggatatattttatttgttagacaggttactatgctgtagtttactttgtctgaagactttatttcgattttttcctccaaggcatgatttccgcttagaacttcatttaaggcttcagccattatgagaacttttattgtacttgcagaaggaaacacttcattttcttttatataaatatgatttgaaggttttttaagatctaaaaagactaacgaaatatcttccttatttgaagttataagattttcaatagtcttctttagaatgtttatattatacaatttatcaccacctctacattaagtataatttaccataatagtaaataaaattcaaacatagtatgtaaagaaatatacatcgtgtatggtttattaagtaaatattgaataaaaataccaaataaagtacaatttatatgaaatataattttaacaaagtgaggataaattaatgtacggtagtttgattcgcataaaagagataattaacgatttaaatccatcagaaagaaaaatagcagaatacattttaaataattctaaggcaatatcagatttatctataaaggagcttgcaggtaaaagtggttcttccaagtcagctgtagtaaggctttgcaaaattttaaactataagggatataaggagtttagaatagctatagctaaggatacggttaatgtggacaaagaagaaaataggtatacagatataaatccaaaggatgatttacatacaataataaagaatataagctacaataataaaaaatcaatagataatacgatggaggtattatcagaggaattagttgaaaaagcttcagaggccatttcaaaggcatacagagttgatttttacggcataggggcatcttatatagttgctatggatgcattccaaaagtttatgaggataaataaaaatgtgagggctacaccggatacgcatcttcaagtggagtttgcctcaaacttaaaaaaaggggatgttgcagttgctatatcatatacgggagaaacgaaggatacctttgaatccattaaggcagctaaggaagcaggagctactacaataagtgtaactaagtttggaagtaattctataagcgatttatgtgacataaatttatttgtcttgtctccagaaatcacgtttagaagtggggctatgtcttcaagaatagctcaattaaatgttatagatatactgttcacctctgttgcaggtcgtatgttcgaggaggttaaggaattccttgaaaatacaagaaagtctactagggtgaagagaattaaataaaaggaagtgtattattatgattattaaagatatagtcataggacacctatctgtaccactaaaaaagccatttaaaactgcggtaagaagcgtaaatagtgtaaatgatgtggtagtaaaaataataacggatacaggaaacgttggctttggcagtgctgcatcaacaggacttgtaactggcgatatcacagaatctatagaaggagcaataaataattatattaaaagaagtatagtgggaatggatattgaagactttgaagctattttaataaaattagataactgcatagttggaaatacaagtgctaaggcagccgttgatattgctctttatgatttatatggacaaagatatggggctccattatataaacttcttggtggatttagaaataagcttgaaacagatattacaataagcgtaaattctccagaggaaatgagcagagatagtgtagacgcggtaaagcttggatataagactttaaaaataaaagttggcaagaatcccaagcttgatataaagagaatgcgtgaaataagaaaggctattggatatgaggttaatcttaggatagatgctaatcaaggatggcagcctaaggaagctataagggcattaaatgaaattgaaaatgaaggtctgaaaatagagcttgtagaacagccagttaaggcatggaatttagaaggtcttaagatggtaactgataatgttaatattccagtcatggctgatgaaagtgtattttccccaaaagatgcagctagagtgatggagatgcgagcttgtgatttaataaatataaagcttatgaaaacaggaggaatacataatgcacttaagatatgtgccttagctgaagtttacggaatggaatgtatgcttggatgtatgcttgaagggaaggtaagtgttacagcagctgttcatttagctgcagctaaaagaataataacaaaaattgatttggatggtccagttctttgtagtagagacgatgtagtaggtggggcgatgtatgataacagtaatatagtgttagtagatgagcctggacttggaattgaaggaataaataattaatgtgatagataaaagatgctgttgtgttcatatctttgaatatactaacacgacaacacctttatttgagttaaaagttgaattctatttataaattctgtttttagattttaagtcatacaatctaacagaagttgaagatgtacgaatacccaatgaattatttttctttgagcttttggatgaagtcatccattctttgttaggaacaagcttcccatgtttcctaatccaattcattatagcagtatttgaattactactaccgcctaaattagcaaaacctgttgctttacctttattagtagtaatcatagcatatcttaaagatccattcttaactaattgtttaaatttctttagagtaagtattggatctgagccactaaaaccgcctaaggttagtataggtttacctgttttaagtattaaatctgaaccataaatagttgctgagggcacttcaacaagatatttctcattttttctattggtgtttaagaaatttatgagccttgatatattagctgagcttatattagcataatttctagaattactattaaagagctctaacccagcagaggggctgcttccattcattttatggaatattggagtagcagaccatataactggagcaattaaaagtcctgcgaagccagtatatataagatttctatttaatatcatattattttttccttgactaatcataattaacactaaaattaccataggtaaaatacctaaaagtaaaatcattaaaataacaattttgtagccagttgaactgttgaatttatagcctaatattatgatttcagtaagggcgtttacaatgaaagctactggaagaatccatttccatcttggaaggtctttaaatagctttaacatagtaactaaacctattccagttaaagcagctattgaaggtgccattgtggttaaataataagtatgagttacattccttgaaaagctaaagtatataaactcaggtagtaaccatgtgaaccaaaacaataatgctaattttcgtttgttgttgaaaggaaatttgaaattttctttaacagaagctattacaaaaccaatcaaagcaaaaggaagcagccatgatatttgatcagacatattgttgccggaaaataattttaaaattccaggttgtgaaatttgagcgttattctttgatagacgcgacataaaagacttattcttaaaagattttataggtggattatttctgtttaagcttctcttactaccatgattactagcattatttatatttactccaattcgttgtaaaccgttatggcctattatgagctgaagaactgtattattgttactgctacctatataaggtctatttttggcaggaacaaaatcagtaactacagcccaagatagcgatactaataaaagtataattgtaccaagagctaaatgttttattctttttttaaaaggtaaagtagaagaaagtagatatgttatgtatatggcaggagccaccatgtatgcctctaccatttttatgttaaaacctattcccacaacagctaagcttattaaaagatattttagttttccattttcagccgctatagataaggcccaagctgaaagcactaaggataaaacaagtaaattgtctatcgtattatttctacttgcagctacaaatattggagttatagcaaggcataatgctgcaattaatcctgcgggttttccaaaggacctttttacaagataatatataatcaaaacagaaaggactcctgcaatagcttgaggcagaattatactccaccctttgaagccaaatacttttgcgaatatggtttgtatccaaaagcctacgggaggcttatctatagttacaaatccagatgggtcgtaggaagcgaaaaagaaatttttaaaattcatcatcatactcttaacaccggcggcataaaaggtattggcatagccttctatgccaatgtttgcaaaatttaatattgcagataaaactaaaattaatgataataagagcttatccgttcttaattctattttatccttcaatttaacttcacctcacttggttcaacttccttaatgttctctttataatttattgtgctagcaattatatagttaggtctagctttactttcatcagaaattcttccaatgtattgaccgagtattccaaggataataaaaattagaccaaacatgcaaagattaatagctagaataagtccgagagttaaaattgttttatgactataaaggtttttggcagttacatatatgaaggcaagtaatccgagtaaaaacattaatccacctaaataagtggaagctacaagaggcttatatgaaaatgaagttataccatcaaaggccaactttagcatttttttaagaggatactttgaagcgccagcaaatctttcttgccgtgtaaattcaacaaaggtttgtttaaaaccaacccaactaacaagaccacgtacatatctgtttctttcaggaagagatgataaggtgtcacaaacctttctatcgattaatctaaaatctccagtatctacagggatatctatgttagtaatgcttcttagtaatctgtaaaatattttagccgtaaatttttttaggaaggattcgccttttcttttgagtctctttccatataccacatcatagccatctttccatttatcaatcatttgtggaattacctcaggtgggtcttgaagatctgcatctattacaataatagcatctcctgctgagagttccataccggccgatattgcgcattgatgtccaaaatttcttgaaaagtttacaagcttaattcttttatccttttcacatattttttcaactttattcattgtggagtccttactgccatcatttacatacatgatttcataattttccttaagagaatccattattttttttaatctcatgtagttttcatcaatgacaagttcttcgttatacaaaggaaccactatagaataaaccaccgtattatacaatttacctcaccccattcatatttgatattgtttacttttaattattgcagttggtaatataagatcaatattactttatttaggtgtcagttaagtttcatatttattaataatatgtaaataatggatgcgtatttataaattttaacattaattacaaataagctcaaggaatatggtttcaaaggggagaggtatggtattaaaattaaatatataatagcatggaataaaagtttagctatttgcaataaagggttattaacaaatagctaacatatattttaagatttatactgtgatttattatttttgtaacttaagcagctttttgctccactcattcatgattacaagggcaggaagtaagtcattacatcgatcagttaaggaatattctacatggggtggtattttgttgtactcaactcttttaacaagaccatattgttctaaagattgcaaggaacgagttaacattatatttgtaattttaggtaaacttcgtttgatctcgttatagcgcatacttttattaacagatagttgccaaataattggtattcgccatttacctccaataacatcaaaggtatgaactaaggggcatatttcacaagaaatagatgactgtttcttattgttttcattcattggtattcctccaaaactaaggcacaaaaatgtgcgtacttgatattttgttcctttgtaaaatataataataacataccatataaaacattaagtgtaaattaaaagtaaaagaggagtggtatttttgaagaagctatttactgaaattaatattaaaaacttaaagataaagaatcgtgtctgtattccaccaatggttgtaccagtagcagaggatggatatgtaacatcatcaaatgtagaacgttataaggaattagctaaaggtggaccaggattaataattcaagaagcaacttgtattaatgaggatggaaagctggcagaaaaacaaataggaatatggagcgatgaccaagtagaaggactaagaaaaatcgttgatgcagttcatgaagaaggatgtccaatatttgttcaaatacatcatgctggtgttgttggaatatcagaagagccattatgcccaagcccttatgaattcaatggatatggtagaaaagttgttggacgtgaaatgactttagaagacataaagtcagtacaaaatgactacattgaagcagcaagaagagcttatgaagcaggatatgatggtattgaacttcacggatgtcatggatatctaatatgccaatttttaaataaaagagtaaacaaaagaaatgatgaatacggcaaaaatcctgaaaactttgtaatagaaatattagaaggaataagaaaagtaacaccaaaggaatttattgttggaatcagattaggtggttttgaaccagcaatagaggatggaatacattatgcaaaaatatttgagcaacagggtatagattttctggatgtttcttacggattttcaaatggacaggaaattaatgtaggagaagattacaaatattctaatgctgtttatgcagctgaaagaattaaaaaagaggtttcagttcctgtatttgcagttgatggaatcaattcaggtgatatggcagaagcaatattaaatgaaacaaatgtggatttagtagatatagctagaggagcacttataaatcctaactgggcaaatgatgctagggaaggtaaggacactggaaagtgtttaagatgttcaaagtgtgcttggtttggtttgtctaaagcttgtccaggaagagctatttttagtagaaataatgcctaaaaaaaataatgtttaaaaaagaagctagtagtgctgtgaaattatttagattttgcagttcagctagcttctttttatgttttttcaaacattgacaacattaggacaattatattagaattaaaatagttttaattctaataattttaattagaattatttgaaagagaggagtaaggatgaataagacattgcactatttgttactaagcacgaattcaacttttcataaaaaggtatttgccaatttaaacagtacagaacttacgcatggacagcctaaagtgcttgattatttaaaatatcatgatggctgtgttcaaaaggatattgctgcggcgtgtgagatagaatcatctacggtaactagtcttcttttgcgaatggagaagtcaggtttaattgagagaaggatgcttaatggaaataggcgctcattatatgtgtttcttactgaaaagggtaaggaagctttagagaaagttactagcgtgtttgatgagctcgaaaaaattgcgtttgatggattttctgaggatgagaaagtcgatttcattgaaaagttttttagaatttataataatcttacggaagaaaaataattaggaggtatttttgtacatatgtcaaaaaaagaattgcttaaaagatatatattttttcttataggactgtttgttaatgcccttggagttagctttataacaaaagcaaagcttggaacatcaccgatttcaagtgtcccttacacacttagtatgggctttccacttacaatgggaacttttacttttatattaaatatgtttttaattgttggacaagtaatatttttaggaaaggattttaaaaaagttcagctaatgcaaatacctatttcgcttgtttttggatattttattgattttactatgtcactgctttcagtgctaaatccaacaacatatgtttttaagcttgtatttttattgataggatgttttattcttgcactaggggtaagtatagaggtaattgctaatgtagttatgctttctggagaggcatttgtaagtgcaatttcaactaaatttaagagggaatttggaacaattaaagtttgctttgatataactttagttgttttatctattataatttcattgctaatgttccgtaaggttgcaggagtaagagaaggcactattgttgctgcattaattgttggtataattgcaagaattttgagtaaaggattaggttttataaatactaaaatacttatggatagacaagacttagaggaagaagaaagtatggtttcataaaaaagaaaattatataaatcaagtggctgttacattaaaacaatgcaacagccactattgtctagaacttaaagtcatcttattacaactcataaacatagttacacacctaaataacccttttatacttttatttaagcatctcattacacttataaatcttcattcgactctattaacataccttaaaaactatattaatatttcaattaatataacccttagaattagtggtgctatgccacataaaacatacggcacattaaaaaatcttcgcttgactattataaatatcttagaaccatatatagtttagtctatataaagctttatggacacctgtaataatcgtccattaacatgtataaaacctcacatataaataactactaaaaaagtaatcaagtttaaatttaatcctatacacatcgcaggtcgaataatttcgagctatttttcaaaccctagttactcttcgctcaacaactttaaatcctttgacaatatatatgataaccatattattttttttatatacgcaaagattaaaattttgtagtagccattatttggaactttaggttacaggctatttctagggaagaagtatatagaagattactaatatagttatagtgcctacatttcatacagcaaaaaggtggaaggggatatacaataatgacacattgacataaggtttcctttactttataattgataacgatattcagtatcaattataaagtaaaggagatagtttatggtatttatttggtcactgatttttatagtaattttatccgtagtatttacaactaatataaagaaaaattacaagggatggtatgctttagcgagttttatttcaatattagtaagcatttatgaggtaatgagaatagtttcacaccctaagcttaatggtgtgattttaagtattgaacaagcctttatgaaaggtaatgtagctatagcattttttattttagttatgtttgcaggtgcattaagtacaaaacaagtaattggaaaaaagttaatgagtataagagctgaacttgctattttagggtctatattgatattaccacatggaattatatattttgttagatttttgattataaaacttcctaaaatactcaatggaaaagcaaatgctactctctatttaatctacatatccattggaataattgcttttataattatgattccattattcataacatcttttaagagtgtaagaaaaaggcttggaggctttagatggaagaagcttcataggtggtcatatgttttttattgtcttatatacttacatattatcttggcactgcttaatggtaagattaattttataaagataattttatatacttttatttttatggtttatactgtaatgaagttcataaagcatagaaatattaaacttagaagaaaaagttaatcacatttaaagtgtattttgttcactaaatgtggataacccatatatataaataagaagctgtggattagtctatagcttttttcttttaaatacaaaaatagatatgattaaaagaaacaaagttaataaagtagagattatagaagcaatagaaatcggattgaaggctttgattttaggaagtctattattcgttatactgattgtaatgtaaaaactgtgctatcacaatttacagtgttcaaagaacatttcgctgcccaatctatcttgaatttgttcaataatttttttaatatctgattcttttccagaagttaagaaccactttagtgaggttagtactaaagaggagtaaagggttgaatagtagtctaataaagagctgtctgtacagttactatgaactattaagtatttcatgaagttcttctttagtaaattttcaatatcatcatataggtggagagtgcctgttcgaatcttccataaagctagtatggcttttttttggtcatataaatgcagataggctttgtaaatagtagaaaaaagatcatttccttttttatcactaaagcgttcattaataaataaagtggcactttttaaaatttcatcgacaagttgttctgctaattcatatttatctgagtagtggttataaaaagttgaacgattaattaaggccttatctaatatattttgtatggtaatttcgttgaattctttttcaaaaagtaaatcgataaaggtatttttaatattggtgcgtgttttaattattcttaagtctattttagattgcataactttttttctccattctataatcaattacttttaaacaaataaattttaagtttcagtatggtttattattaatcatacatattaattttaacaaaataaaaggcaattatcattaaaataatgtattttatattgttaaacaacaaaaatcatgagatttgtatattatcaaatgattcctcatactttattggttgttaattactcaaaaaaaaaataaaataagaacatacaaacgagagcgcctctcaataaattaagaaatagataaggtgatgaattttatgaaaaatacagaaataagaaaaaatatattcccagttggattttatgatgatatacacccagattttagtgttaattttcagatgaaccgctgctataccatgacaaatgatgatgttatgcttaaagagatgagagaaataagtccaagcattcataattatgaagaattcattgagaaattcctagagctatataataaagcattaaatgaaggacataaattaagagcggcatattatctaagaacagcggaattttatatgacggcagatcatcctcaaaagcaaaattaccgtaaacagtttatttcactaatgcaagagtattttaacatcagtgatgaacagccatataaagttccttatgagaatggattcctccctgcttatcgttttacttcagaagctccaaagggtacaattgtaatgttcggagggttcgatagctacgtagaagaaatgtttaaaatggctttatttcttaaagaagctggatatgatgtggtatttttcgatgggccaggacaaggttcagctcttgaggattataaaataccaatgactcatgaatgggagaaacctgtaaaatcaatattggattactttgaacttgatgatgtaacgttattaggaatatctttaggtggttatttaacagtaagagctgctgcatttgaaaaacgagtgcaccgtgttattgcagatgatattctttcaaatttttacgaagtagtactaaatacacttccttcacaattaaaagaaaaagtaaattctcttatgtctgatggaaatgagcaagaagtgaatattttatttaaagacttaatgaagaaaagtcttatggtagaatgggcaataaatcagggtatgcatattacaggaagtaagacaccgtatgaattcttgaataaaattttgctttacaatacatctaaaatatcagaaaaactagagcaggatgttcttcttatggcagcacaagaagatcattatatcccactaaatcaatttttcgaccaaagtaaatctcttataaatgtgcgatctttaacaactcgtatgttcactagaaaagagactgctcaaaatcattgccaatcaggaaacttaggacttgcttttgaggttatagcaaattggatagaacaaatacaaaagtaaaatgtgctggtattgcattgaaataattaagcattgtataatcccaattcggacataagatcaccaaagtgatattatgtccgaattgggattaagatgaaaagtattgtaatttacgagtcagttcatcatggtaatacggagaaggtagcaaaggcaatggtagaagaattaaatgcggaatgtataagagcgcaagatttaaaccttgaaaagcttaaagattatgatttaataggatttggatctggaatattctataataagtttcataaaaatatcttaaaattagtaggaaatataggaaaagttaatggtaaaaaagcagttgtgttctcaactagtggtcagggaagagagagtagcaacaaatctttaagaaagcagcttgaggaaaaaggatttaaggtaataggaagttttgcgtgtaagggatttgacacatttggaccacttaagcttttaggaggaataggtaagggaagaccagaccaaaaggatatagaagaagctaaaaagtttgtactaggcttggaaaaaaatttataaaatttattaagaggtatcgtataaattaacataaagtaaccacattgttgtaactcaattgtcacaatagtaagttattatataaaaagagcagagcaaattaatataatgtacaatcagtcagtttgatcccccttactaactgattgtacattatttaacgtatatataaatttagaaatacctctttaaattcttttagcttttataataagtctatgagtagctattcttataggagtacaggtaactaaggtcatagttggatctttagtctgatccagtacatgaacttcactaggaagaactaccttagtactgtaaaccttgtacttaaaagtgccattcacagtttctacatcaatttcatcaccggagcctatttcacctaatctgttaaagtactcaccaaaagtataacttctgtgaccagcaaggcaaaaattgccgttctgtccaggcatagaggtattcctgaagtgtcctactgcatatttcagtgttttaaggtcagtgccttctcctatcgcaacctttaagtctattttaggaatttttaaaatgccaatagtgccatcttttattgtatctttaatttctgctgcttttactttcttattatttgagtgttttatattttttattttcttttcataagcatttatcatgctattctgtttatggtatgtccaatattttgcacctagggtaaagcctattaatataactcctgatgatataagtgtagctgctataatgtttaactttttcactgaaaaattcctccttttggtaacatgaagtgatttcatatatgtataaagtaatataggaaaactaactcaactgatatgaataagttgaattagtttccctgaaattatagttagggtaaacttagccgtaattttatttagtaggacttgatttctttttgtttacgaatattaaaatggcacctgaagcaagacaaattagggcaatcgataaaagcatagtagcatcaaaaaattctcctgttttaggaagcgagcttaaagtttgatttgaagatgtactattgctgctatttggagtcgagctatttgtattattagtattagtgtcagctggtgcctttaatttagctaaagctgtttctgcatcagttaattttgagtaatttgtaactaatgctttttgaggatcagttagtgcattgtaggcagctcttgctgtagtaatagctccttcatcatttaaggttacattatttggtatagtgtttatttttgatattacatcatttgcagcttgactatttgcagcagaagcttttaaagcttgaattttatttatgtcttgagttaatttatcagcatttgaaactaactgcttttgatccggcgttaaagagttgtaagcatttaatgcattttgtacattagcgtcatcgtttaagcttattgaagtagggtcaggtaaattattaattgagtttataacgctttgtgtatcaggagccggtgcagaggacttaaccaaagtatagctatctgtttgtgtcatagtatctgttctataagtatctattttaaagctgttacttgttacacttacacgtgaaactgtaggctcatgaagctgctcttttttagcttcataataattattttggttaggttctttcatttcgtagtatttacttccacttgcagaatttgcagttatatataaagttccttttggatttataattcttccatccttatcaactgtttggtccttaagtgcttgaccacctttcatttgataagatcttgtatagcagtgatcgtgaccatctaaaactacatcaattccgaattcgtcaaagattggaggtaaatcacttcttctttgtataatatctgtatcagtttcatgatcagcagagctgtaaactgagtgatgtagtacggcaaccttccaagtaacgtttggatttttgctgatagcatcttttataaaagcctcatgttcagcttcgttcatgtcattactatttaacataagatataaagtatttccgtatgtaaaatagtaatctgttcccgtagttggagcactgctaaaagcaccatacgtatttgataaattaggagcattaaaatgagtgttatgaccaactccataagtttcgtggttaccagcaattgaagcaacaggaagacttttaaactcatctggagcgaagtactggctgtattctgtttcattactttgtccattaagctctttaccattgttaacctgatcacctaaagaaattaaaaaactagtatctgagaaagtaccagtcattttatctagtgatgatttccaaccagctccatcgcttgctatatcaccactcgctccaatctgagggtcaccagcaaataagaaactatattggcttgtatcatgtgtagtaaaggtataagtagaactccagtttgatccatcaccgaggcgatatacatactggctagatggctttaacccactgactgaaactttattagatgtaaagtttagatttccctgtgatgtttttcctgtaaaagtagagcacttatttgcagggaaatcactgtcattagcatctgatttaagtgctacctcaactgtaggggttgcgttactgttattagagtaccaattaaaatttaattcactgggatcactacctggagataagactatatcgctaaaatctcctgagccactactacctgctagtgatattgcagcattgttattagaattagcaaatgtactaatgcctaaagcagtagctgatgacattataacagttacacctacagctatagcaattaatttttttcggcttttcaatgatatcatccttcctctatattactttaaataatgcttttaccatatcaatgctagcattttttcatttgaattacctacacatctgtgtaaatttttgtaaaaaatacataacatagaattaacttactttttacactcaattaactgtttttgtaagtaaacgttctataatagggtatagaattacattgaattggaggataagcatgaatagtagatttaaaggaataagaataatcatttttagtgcaatagcaatattttttttggcttttttgtacatatttaatataacacatccagttaaattcagctatgagaatggaaaatcaaatgttaaatatgaaagagctagggttttagaggttactaataacaatttaagaaaaagtataaatttaaccaatatatattttgggagtcaaaaggttaaagttaaggtgcttacaggtgaacataagggggatatcaaggtggttcaaaattatcttacggatatacataatgtgttcactaggaagggaatggtaattgtaatagaaatagatactgtaaatcaaagtaagtatactgcaattgtatataactactatagagcaccagtggaatacgcatttatatttatattttttgcagcgttatgttttataggaggaaagaatggatttaaatcgataataggaatagtgtctacattgatatgtataatattcctatttgttcctatgatctacaacgggtattctcctatattagcatgccttttaatagtagtcttaacaacctgtactactttgtttttacttgatggtattagtgccaaaacaatatccgctgcatttggaacaattttaggagtggttatttcaattattgtaggaattatttttggaggattaagtcatctttcaggtttaaatatggagaatgcagaaactttaagcttgatttctaccaaaacagatatgaaagttcaaggcttattgctaacttgtgtaattatagcatctttaggagcacttctagatttaagtgtatccatagcatcttcaatacaagaagtgtatcagtcaaacaaaaagcttaccgtaaaacaactttttaaatctgggatgaatataggaaaagatttaatggggactatggcaaatactcttattcttgcgtttacaggatcttctcttaatgttctggtagttatatatgcctataatattagctttactcaaatgataaatatggacataattagtgtagagataatcgaaggagttgccggaagtttagcggtagttttaactgtaccaattaccgcatttatatgttccaaaataataccatttgtagatatgaagcttctagagaaaaatgaaaagagtattaacaagtctgccgtttagtaatacaatgaaagagcaataaatggttgatgagtttttttaaaagtcttactaaaagagcttatagtatatcaaaaataataatattatggtttataaaacatattttaattacatttactgtaaatggtatgtaaaaaatatagcatatttgatataatgaattgaagaaattatttctatattgaagaaaaggaaagtggtaaaatgaaaagaaaatttattttaggaataatagcagttgcagttattgctgtgggtggatatatgtatacaaactctcaaaagtcaagtaagggtgttgagaagaaggtgacttcagtaaaagagagtcaacctaaaaaagcaactgtagaaaataaaagcagtaacagcagtgctaatcaaaatacaaataataatgtaaataacaataatgctgaaacagcttcaaataaaaattctcagcaaaacgctaatcagagttcagcaaatgtaaagcatgaaaaaagtcaagaagagatatatatgggaacttggactataaagaaggtaataacttatggtgcagcaggaacatatggtcaagacgatataaataaaataataggaaaaaaattgatgttttccggagacagtgcaacttgctttggtgatgatttgagttatttgaataaaactattaaaacacctacgtaccagaaaacaagtatgactaaaaatgattttgaagcaggatataaaaaagttacttttgaaaaattaggcttaagtggtgcaacagttactcaggttgaagctaaggattcaaatggtaatacaggatgtacattttttattaaagatgatagaactatgattttgtatggtggcggagttttctttgaaatggataagcaataaaaaattaatagttaagggtatgctgtaattaaagcatacccttttgttatgatataagaaattataataaatattaaaagtgaaagcaaagattcctattatttataaaaataatttaacacaattaaaaatattattaaaatcaagttgacctctgttcacaaaactgttacaatatagaaggtttttattaaaaaatgtaaaccaatgaggaaaaaatggagggtaattatgaaaaacatgaaaaaaggcgtagtaatgctattgatgcttttactagtttcgactatgttaatgggatgtaaaccaaaggtaggaccagatgagtcggcaaaaattataagtgattttatggttaaaggtgataggacaaagatatctcaaattataaaagataagaaagaattagataaatacgataaaaaagaaaaagatacatttgttaaagaattaaaggattcatcttctagtggtgatttacaaataacagatgctcaatgtgatgaagtgtatgatagcgttagagccgcattaaagaaggtaactgtaacaacaaaaaaagtatctgaagataaggattctgcaactgttaccgttacaacaacatatgtggacatgacatcagttgtaaagcaagcagttactgaatcagtgaaggaagttatggcagaaggtttaacagatgaaactcaagctaaaaatgaggctgtaaaagcttacattaaaaatgtagcaaaggatatgaaagagataaaaccatcaactaaaacagtaagtaacaattttaaatttaaagtgcaaagcaatgtttgggttccagaagatgaagatgcttttgaaacaaagcttggcgagatggttttaggagaataaaatattataatttaagcggagattcttgtgaattttcgcttaaattttattgttttaattaatgtgtggaggataatcatgaaaaacataagaaaaagtgcagtgatattaattatactattactagttccaataaatctgataggatgtaagactaaaattaaatctaatactgacgttaaaaccaaaactgattctaaacctaaagtaagtgcggtggaatcagcgaaaattatggctgatattacagtaaaagatgatagagaaaagtcttctaagtttagtttttatgaaaaaatgctaagtaatacttctgatatgcaaaaggatgtgttcctttcagctataaaaaaaggtttttcaaattatggcgtacaaattaatgatgatcaatggaataatgtatataacgcttataaagattcattgaaaaaggtaaatataacaacaagtaaagtaactgaagatgacaagagtgctattgttatggttaaaactacatatatagactttacatcaattcgtactcaagcggcttctgaagcacagcaagaggttaaagcgatgcaactaacagacataaatcaagctaagcaaaagtatgttgaggtatatgctaatcacttaattagtaactttaattcagcacaaccatctacagatacaaagagtagagaatttgagtttaacaaggataaggcttttaatgaatggacacctaagaatacaacagattttgaaacagaacttattgatatggcaatcggaaagtaagaaaaagtatattataataaaaagcctgcagggaaaaagtaattcatgcaggctttttatatagccttagtattcaagttctaaatctttcaacatattaaagtcgtcatttacactttgtccatttgtggtcaaataatttcctataagcatcccatttaagccagacaagaatccaagaggttgaaggcttctaagatttttttctcttcctccagcatagcgtattattttatctggtagtatgaaacgaataattgcaaatgttttaattatttccattggagaaagtggttttgcattttcaagttttgttccttttactggatttaatatgttaacaggtactgcatccacatttaggtctctcaataaaagagcatgttcgattctttgttccatggtttcaccaagacctacgatcattccagaacaaacttccatttttgcatttttagcatagtttatagtttttattctttcatcatagccgtgagttgaaactatatttttgtaaaaactctttgcagtttcaaggttatggttgtatctttctacaccaacagctgcgaggctattcattgctttctcagtaagagtaccaagacaagcacataattttagatttgtgttttccttcatttttttgaaggctttaagtatggtttgaaaatctttttcatctccagtatagccaagcccgcttgttgcaatatcacaatgccttgctccataggcttctctttgctttgccatttcaagaatcttgtcttcatttaatagtggatagcagctaacattagctttgtgatgagcagattgagcacaaaaagcacaatcctcactgcaatttcctgactttgcatttataactgaacataaatcaacatgattgccattaaatttttctcttaatttattggcaaagctgcacaataaaaatatatcgcttccattagattttgaaagcgttaaagcttcatcagcagttattttttctccgtttaagaccttttcacctatggaaagtatattgttccattgattcttcataaaaaaacatctcctagaaattaattatttaatgaggttttatttaagataggaagtattctagagcctaaaagtgcagttattatacattttacaatatcaccaggtataaacattaagacacctaattttatagaagcgattatagaaacattttttcctgcaacgtaatttaaaattatgtatagataggttgtaccgataaaatatactgctataagtcctaaaatgcaggagaaaaatatagttgtaaatttgggctttctactatgagttatttttccaattataaatgcagctaatatgtatcctataagatagccaaaagtaggtgtaaatatgtaggataatccaccacctgaagtaaatacaggtagaccaattagtcctagagctacatacaaaatttgagaaacagcgcctaaagctccacctaagagaacacctgagagggcagtaaataggaattgaagattaattggaacaacgccaacagggattttaataaatgctcctataattgtcattgcagtaaataatggtatcaaaactaaatctcttgttttaaatttcatagcttcctcctaaacaatattgtaaaccgataatataacatcggtttacaattgaattataagattttaataagactatgtcaatgcctttttatatggtaaaataaatttataagctagatataaagcaagtgtattgcattgtatataaagaaggtgttgaagtttggcaggtgtaaaaatcagagtactagaaatacttaagaaaaacagtaatgattttgtttcaggtcagagaataagtgatgagcttggcataactagaacggccatatggaaaaatataaagtctttaaaggataatggatataccatattatctctcacaaataaaggatacaaacttgttgattgcccagatactctaacctatgaggagataaatgaggatctaaaaacaaagtttataggaaggaaaatagtacatttcgattctattgagtctactaacatagaagctaaaaagttagcagagcagggagagaaagaaggaactattgtagtcgcagaagagcagacacttggtaaggctcgtatgggggagaaatggtactcgcctaggggagagggtatatggatgtccataatactaaaacccaaaattagtccagagtttgcagcggaagttactaatgcaacagtagaggcagtggggaaagctttgataaaaattgaacccagcgttgaaattaaaaaacctaatgatatatttgtaaatgataaaaaaatgtgtggaattttaacagaaatagatggggaattaaacttattaaattatgttattgtaggtatagggattaatgttaaccaagaacaattccctgagagtatgaaattaaagtatacgtctcttagaatatgtaagaataaagtttttttaagaaaaaaattattgtgtgatatattaaataatattgagccaatgtatgaagatttattaatgaaaataagaaaacctagtcatagggggagttaatgactaggtttttctgttttatataataattggggattgatattaaatatttctgcctactgcttaccaacagtaggcagaaatatttatgtagtggtcttttatggggaattacttggtttttaaaacgcttttttcagcaggtataactatagagttaccaaccgataaaaggttattgtttttaaaactattgtgctgctgaatgtctgttacaactccgagtgttttataagtcggcataaaatgttcagctaaactccaaaggtgatctccagattttaatctatattttatataaacgtaatcggcatcctctgaaactgtctttacaatttcgtatgattgtgtagaattatcaacattttgaacattttcactagtacttatagcagcttcatccttatttttagaattatcaatattagataattgcgctgtactaggttctttattcgcttttttttgtaaagatagtgaagcttgatgtttttgagaactgtttttagtttgatcgtaatatacgatgccacttccaacaataaaaacacatattagaaataatataaaacgtaacttgtttttactcactattaaacacctcttttcttatttattggtaattattgactagaaaaaaatttttatacatacttttaaaaaaaatattaaaagtatatagtatataatgaagctgaaataaattaatggctgaattcgtttcatttaaattagtgaaaattaaatatgatttggtaggtgaaaggattggacactaaattattattaagagaattatgtttgaaggatgcaccaagtggagctgaaaaagaactttatgacgttgtaaatcgagaattttcggaatttggaaatgtagaaatcgatgaactaaataatatatacataaataaacgtggaaagggagctggcaaaattgcacttatggctcacggagatgagatttttcttatgataagtggttttgaaaaaaatggcttcttaaaatttaaagcagtaggaatagatcctaaagtattgatttctcaggaagttaaaattcacggaaaaagagaagtacttggaattataggtgtaaagccaccgcatttaatgaatgataaggaaaaggaagctgcaattcccacaagtgagcttttaatagatacaggttttagtactgataagttaaaggaaatcgtaaacataggagattatgtaacgattaaaagggatttttatgaacttttaaataataatgtggcttgtaaggcaatggataatagagctagcataacagcaatgtatgtgtgtgcaagagaattgaataaaatagatcacaatgctgatgtggttttcatatgctcatgccaagaagaggttggacacagaggagctaaaatgtcagcgtataagactaagcctgatatatgtatagcagtggatgttacctttgacggaggaaaacttggagatccagatagagaaaatgaagtaggaggaggtccggttatatgtataggtcctaatatacacgcaaaggttagaaaaaaagtaattgggattgcaaacaagtataatattccttataaagttgaagttgaacctggaaacacaggttgtgatgcatgggacactcagatatctagagatgggattccatcgcttttaatatctgtgcctgaaaaatatatgcatacctctgttgagatggttaatatagaagacatagaaaatacaggtaagcttatagctaaatttattgaagagctaaataacattgaaatggaggaacttttatgcttttagataaactttgcaatgcagctgggccttcatcctttgaaggagacgtaagagctatcataaaaaaagaaattaaggcctttgttgatgagataaaggtagatagaatgggcaatataatagcacataaaaagggcagcggaaaaaagataatgctggatgcacatatggatgaggttggatttataataacatcaatcaatgaagatggtacaataaaatttgcgtccattggaggcattaatggtaaaattataccctcaaaggttgtctatataggtgaaaataaaattccaggagtgataggaataaagcctatacaccttcaaagtgctgaagagagaaaaggcagtgcatcatatgataattgctttatagatattgggtcaaaatctaaagaggaaacaaaaaaatatgtgtcattaggagattatgctgtattttcaactgaatatggtgaatttggtgaaggttttattaaagcaaaagcgcttgatgatagagttggctgcgctgttttaatagagcttttaaaggaaaattatgagtgtgatttatatgcagtatttaatgttcaggaagaagtaggagaaagaggtgcatatgtatcagcatttcaggttagacctgatattggaattgcccttgaggggacagtatgtgcggatatgcctaatgtacctgaatatttaagagccacagaactcggaaaagggcctgctatttctattatggataaaagcagcatatataatgaagagataacattagagttgataaaaatagctaaagaaaacaatttggcacatcagatgagaaaatcaacatctggtggaaatgatgcaggtgctattgcgtcaactggagaaggagctaaggtagcggcagtttctgtaccatgcagatatatacattcctctgtttcagttgcgagtttaaaagacattgaaaatactatagagttattaaagaaatatttattgagctttaaagggggaaaataatatggatatgttgctaaaaaaaattcttggtacctttggagttagtggaagagaaaaagaaatatcggaagttataaaagaggaattaaataaatatccctgcgaagttagagaagataaactagggaatattatagtaaagcttgggtctggaagagaaaaaataatgttaagtacgaacatggataagaagggggtaattacttatcatatagaagaagacggtaaagttagaattgatgccataggagatattaaggcagatgatatcataggtaaaactgttgtttttagaagtggaatagaaggaaaaatagagtctgagaagaaagaaaataatgaatttagagatatttatgtcaatgtaaatatgggtaaaagagaagccgtattaaaatatataagtgagggagaggctgctgaatttggtggtaatacctttgcagataaagaaaatgtagttggcccatatttgagtaatagagcaggatgctatgcttttcttaaggtgattaaggagattaaaagcatagacaaagaagtgtattttgtattttctactcagggaaatttaaatggtaggggagctagagcggctgcttttgaaatagaaccagatatgtgtatttcagtaaatacagaaaaagaaggagaagtaaagctttctgaaggccctatacttgttcttatggagaagggacttataactaattatcatgtaaaagaacagattattagtagtgctgaaaaagctcagataaaacttcaaagatgtgtttctagtgaaagtagtgatggaagcgtggtacataaggaggtaggcggaataaaaacaggcaccatagcgcttccttgcaaaaataaaaatgaaacaaatgagactataagtttaaatgatgtggatgatttagttaagttactacaatacattgtaaagaagtaaagttgagtgtaaaattacattaggggcaagaaagcctacaaaaaggaaatttaattaatagatttcctgagttaggctttcttagttttataaaataaaaggggtggcgtaattgaaaaaagcagcagtacttggacctaaggggacttttagcgaatttgcagttaaagagtataaaaataaaattgataataatattgagatgatattttgttcaacaatatcaaaagtagttaaggctgcagaagaggagtgtgacatagctataatacctattgaaaatactttagatggttttgtacaagttacacttgatttgttaagtaaaactaatcttaatataatttatgagcttgttttgccaatacaattcgcttttgcagctaatagcaaaatggaagaagttcagagggtctatgctcaatttaaaactcaaggtcaatgttgtgaatttttagagaaacacgatgagtttaaaataattacaacagagagcaatggacaatccctaaaaaaactaaaagaaggtgtattaggtgaaggggctatagttcctgcatatgctgttaaaggaactaacaaatttaaatgcaatattaataatgtcactgactcagagggaaatgagacaagattcatagtactatcaaaagaaaaagttcagtatgaaggtaagggttattataaaacaggcataataatttcagatgcgaatgcagacaagccaggaacattgtggagggtactaaatgaattttcagtaagagatataaatcttacatcaataatatctaggccaactaaaaaaggacttggacaatattattttttcattgaggttgatggatgctatttcaaggacaatagattaaatgaagctgtagaggcgataaaacatcatagtgttgtaaaagtagtaggtacttattataaaatataaaaaattattttgccttaaaggaatacaactatctcttcttttaaggcatttttaattattataatctatgttttatcttttaatactgaaaatataatgcttaaagccaaaatcacgaatattattagtagagataaaattataggtatctctatatggaagaataaaattccaagtttaattccagtgaaaataagtataaaggctacaccaaatttaacatactgaaacttattgtgtattctttctaaaagaaagtacatagaacgaagacccaagatagcaaatatatttgaagtataaactataaagggatttgtagtgatagaaaaaattgcaggtatggaatccacagcaaatagcagatcagaaccttcaattaaaactagtattggaagtaggggagttgcaaaaagaactccatttctttttaataaaaacttatctccatcgctttcatttgttataggaataaacttagaaactaatttaaaaaagaagctattttggtaattgttatttgagtgctctttatctagtagcatttttataccacttactatgagaaggatgccaaaaaaataaagtatccaatggaatttatccactacagcaacaccgagaagtataaataccaaacgaagcagcatggctccaaatattccatagcttaaaattcttttttgctgaaagtctgttagagagaaactttcgaatattatcaagaatagaaaaagattatctagacttaaacttagctcaataacataaccgcctaaaaactctaaagcactttgttttcctgtgaagaaatatacaccaaggttaaaagccaaagcaactagtatccatagtataacgtgttttaaagctttttttgtatctataatattcagccttctttcttattcatagtttacaagggattaattcaaaatagtgtgattattgagttattataattgataactggataaaaaaatagtaaaattgaagcaagagtatgagcttaaagtgttttcttaagcacagattttaattttatccaatcttcttcatacatttttctaaactcgtcgttttgattataagtcaatgaggacggatgatacatagggaaaattgtacagctaaaatcatcactgtgaacgggagttccatgacattcgcctatggctttaaagtttgttaaccttttaagaggaacatttcctaaagttattattatctttggttttacaattgagatttcttcatctaagatttctctaaataaatttatttcagatgttttaggcggtctattacttatagtagtcttaccattctttgaagtttttatttttataggtctaaaaaaacatgtatttgttattcttacattacttctttctacgcctatagagttaaggtacttttcaaagtttttgcccgctacaccaacaaagggttttccgctttcaacctcggatttaccaggggcttctccaacaaacattatgtcacaaggtataggaccatctcctgttataaagccaccagtagcctcttctttataattatttgctatagtttctattttgttttttagaaattgtaaattattcatataaggtgctcctaactaaagttaaattttaatgttgcataaattaagattcttatatattgtaccaaataatagagtgaaaaataacgtataaatctaaaattgattaggaaggtgaagtaaaatgaaaaaaatggtattgatatcattagcagcagcatcattaataacactctcagcgtgtacagctaagagtaacaattcaagcacgagtagtagtaattcagcttcaaataagactaaagcaagtagtaaaaatacatcttcatctagtggtaatagtaaactaaaatctgaagggacaagtacaaatacaaatacaacttcaaacggtgattatgtcataagtgatgtaagtagttggaatcatcctgttaagaatatttttggaagagaagctattaaaataaataaagttgttttacagaataacaagacctatcctgtattctatgtaactttaagtaaagaattgaatgcagaaaacaaggcttactatacaaaacttatgaaggaaattgccttggctaatggatattgggattatgaagtaatagatagtagtaagggagcagatataaaagttaaatgtaaaaataaaaatgctattgaatctataacttacaacaaggatagcaactattttacagtcagcagtgcacaagtgctctcaaaggaacaggaacttgtaaattatcttactagcaatgtaagtgaagtgaaaagttttgtggatgtacacgctaataacacaacgtctaaagcatccatatatgttgaaaggtatcctgatgagacctcaactaatacatacgaaaaaagctattacataatttatgtgggtgaggctttttcagatcatacagttaatacctataggtttgctataaataaagatacaaatgaaatattatattatgatacagcaaatgacaaatatgaaactttagcagagtggagaagtagtaaaaaataatagagattaagggggcactgtaaatttaagtaagctccctttttcacatagtaaactagtcttataaaacatataacttatgtataaaataattcatattagaattttaataggagtgatttttatgaaagtaccaatcataatgacaccaggacctacaagcgtaagagaaaatgttagattaagtagggctgagaaaacaacaaatccagacttagatatggatttttatgatttttacaaaaaaactacagaaaaaataggtaaattcttaaaaacgaaaaatgaagttagaattctatcaggagaaggtatattaggacttgaagctgcttgtgcatctctgactgaaaaaggtgatagagttttagttatagaaaatggtatatttggagaaggctttgcggattttgtaaagatgtatggaggagaaccgtttttcttcagagggaataaaaagtgcagcataaatatagaagaattggagaggtttctagatagtgacagtgagttcaaatatgctactgttgtccactgtgatacaccttctggaatgttaaataatgtaggtgcaatatgcaagcttcttaagaaaaaaggaataatgacagttgtggacagtgtatctgctatgggaggagaagaattaaaggttgatgaatgggatatagatatagttattggaggttctcaaaaatgtatatctgcgcccccaggacttacaattgtaagtataagcgacgatgcttttagtgctatgaaaaataggaagactccaatagcatccttttattgcaatttacttgtatgggaagattattataataaaaaatggtttccatatactcccccaataagtgacatagttgcgcttagaaaagccgttgaaaatattctagaagaaaaggatataatagctagacatgataagattgcatctgctactagagcggcagttgtacttggaggattagaaatatatatagaggatggtttttcaaatacagttacagtaatcaaggttcctcatggaatgaatgatgataaaatattgagctatatgaaagaaaattataatgtgatgatagctggggcttttgattatcttaagggtaaggtattaaggataggacacatgggtgaaaatgcttatgtagataaagtgagttatactttgtttgcgcttcagagaaccttagagcattatggatttgagtttaaacgtgatatggttaaggtatttttagaaaaagtgtgaggtaaatcgatactaaagcgacacaatggattatataattctattttgtcgtttttaatttatacaaaatatgagataatagtttgtataaatgcaaggttaattataatctaaaaggtggtgcacatatgaaattaatttcgtggaatgtaaatggcttaagagcttgtataacaaaaggtttcttagattactttaaagaagtggatgcagatgtattttgtcttcaagaaactaaaattcaagaagggcaagttgagctagagctgcctggatattatgatttttggaattatgctgagaaaaaagggtactccggtactgctatattcactaagaaaaagcctataagctatagttatggaataaatgaagagaaacacgataaggaaggaagagttataacacttgaatttgaggatttctatatggttactgtttacactccaaattctaaagaaaagttagcaagactggaatatagaatggagtgggaggatagttttagaaattacctcaaagcattggacgaaaagaaaccagttattgtttgtggtgatatgaatgttgctcatacagaaatagatcttaagaatccaaaaacaaatacaaaaaatgccggttttagtccagaggaaaggagtaaattcacagagcttttagaagctggatttatagacacatatagatacttttatccagataaagaagggatttattcttggtggtcatatagatttaaagctagagaaaagaatgccggatggcgtatagattatttttgtacttcagaaagattgaaagataagcttgtaagtgctgatattcatactgaggttatgggatcagaccattgtcctgttgagcttgttataaaatagacttttttagtatagagatgataaggtgtttgatccaaagtagattaaacaccttattttaattataatttatattttttagttaacgctaaaagtctttcaacttaatagcttaacgtcaacaattgacataaagataaggactaataaaactatatatgttaataataagaatattattattgaggatacatagaggtccttatagaaaatatcttgatttgctcaaccatttaatgggtatttattataaatagtagaggtaataaacattacaacggtatgtataataaccaaaattataaaagagttagcaattctaaaatttttaagttaacccctcctaaaaaatagattgtaaattattatcgccatttataaatttgaaacatgttccatggagttttgggtaaaaaaaattaagttttactatgcatgggctatatgagataataaagaatataaaacaaaaaaggagaataaaaaatggattttactttaatagcaacatctacatttggattggaatccgtggttgcaaaggaacttaaagagcttggatatgatgatttaaagatagaaaacggaagagtcacatttgaaggtgacgaaatggatatagtaacttgtaacttgtggcttaggacagctgatagaattcttataaaaatggcggaatttaatgctgaaagttttgaagagttgtttcaaggaactctaaaagtagagtgggaaaatataatgcctcaggatgcttatatgcatgttacaggaaaatctataaaatcaaagcttcatagtgttccagattgccaaggaatagtaaagaaggctgttgttgaagctatgaagagaaaatacaatcttgaaagatttacggaatatggtgcagaatataagatagaagttgggatacttaaggatgtagtcacattaactcttgatacttctggagaagggcttcataaaagaggctacagagaaaattcaggtggagcgcctataaaagaaaccttggcagcagcaatggtgcttttaagtgattggaaccctgatatagaacttgcggaccctatgtgtggttcaggaactatagctatagaagctgcattaatagggaaaaatattgcaccaggacttaaaagaagatttgtatctgaagagtgggatataatacctaaggatttgtggagtgatttaagaaagcacgcaagaaattcaataaatgataaggaatttaacatactttgttcagatatagatggttgggtaataaaaacagcaagagctaatgcaaaaaaagctggagtagataagtatatatcttttcaaaagctgcctatgcaagatttttcatcaaagagaaaaggtggttttataataactaatccaccatatggggaaaggcttggagaagtaaaagaggtagagaagctttataaggatatgggaagagtatttaaagctcttgataagtggtcatattttataattacagcacatgagaaattcgaagattgtttcgggagaaaaagcaataaaaatagaaaattatataatggtaagctcaagtgttactattatcaatattttggtgatagaaagtaaaaaggggtggtgcctctatgtataggataatgattatagaggatgaagaaaaaataagaaatatcataaaaaaatcattggaaaaatggtcttttgaagcccatgcagtagaagattttaacgatatatttgagcaatttgtaaaggtaaagcctaatcttgttttaatggatataaatcttcctgtttgcgatggattttattggtgcagcaagataagaaatatatcaaaagttccagtgatatttttatcatcaagaagctctaatatggatgtagttatggcagttaatatgggtggagatgattacataacaaagcccttttctattgaaattttaatggcaaaaataaatgctattttgagaagaacttattcctatagtgaaacggaaatggatactattgagtttaaggatgttataatttcattgaagaacaatacagtatactataatgaaaacagtatagagcttacaaaaaatgaatttaaaattatttatgtgcttatgaaaaatcatgacagtatagtaagtagggaaaaaataatgcaggaactttggcaagatgaaagttttatagatgataatacgcttacagtaaatataaatagattaagaaaaaagcttaaggaaataggagtagatttcattaaaacaataaaaggacagggttacgttataaaatgagttttataagatatctaaaggataacttcagatttatattactatatgtgcttttgggtgcatttgtttctgcatttacatacttagacgaaaaaaatagaatgctttcttctaatataggatatatgatttttgtaatgttttttatacttttaatttttttatgtgttgattatagtataaagaataaacatataaaaaagctcattgcaaatggtgaaataaaggacaaaacaccaattttgccagaaccgttggaatacaaagacgaagtgtatatatccataatagaggatttatataaggattataatgaaagaatagtaagtcttgaaaaagaatttgaagataataatgagtttatgacagcatggattcatgaaataaaaacacctattgcaactgcaaagcttttgcttgaaagtggggaaattgatagtcaattatttatggaagagatagaaaaaatagatgactatgttgaaaaggtactctattattctagaagtgataatttttcaaaggattatattatttcagaagtaaacataagtaaactaataaaagaatgtataaaaagccattctaagatatttataaaaaaacatataaaattaaaacttgaaatagacgaaagatttaatgtagagacggacaagaagtggtttttatttatactaaatcagattatttcaaatgccctcaaatatactaatgatatgggaaatataataataaaggcttttgaggatgacaatgaaaaggtagttattatagaagataatggtataggtataaagaaggaagatttagataggatattcagtaaatcttttacaggatacaatggaagaaaagaaaattctaaagctacagggatgggactatatttgtctaataaacttgctgaaaaattaggacataatataactatagaatctaagtataatgaaggaacaaagctttacatacacttccctaaatggtgtgattattatgatgttacaaaaatgtaaggttaaaaagcaaaatgtaagccagaaaaatggctgtacattttgcttttttatataatttacatataggaaacgaatattacttataacggaggtagaagaatggaagtcctaagaatagaaaatttaagaaaggtatatggatctaagtttgggggagttaagtatacagcacttaaggatataaatctaaaagtaaataagggagaatttgttggaataatgggaccgtcgggatcaggtaaaactacatttttaaatgtaatatctaccatagacaaacctacagcaggaaatgttattattgacggcaaggatatagtaaagcttagagagcccgggttatcgaaatttagaagagaaaaactcggatttatatttcaggattttaaccttcttgataacatgacaattaaggaaaatatagttttacctttagcattagctaaaacaccatataacgtgatacaaaaaagactagaagatataagcaaaaaactaggtataaatgaaatacttaataagcatacctatgaagtatcgggaggtcaaaagcaaagggcagcagcggcaagagccattataacagaaccgtcacttattttagcagatgaacctacaggcgctcttgattctaaatcatctaaagaacttttaaattctttaggatatttaaatgaaaagaatgaagctacaattttaatggtaacgcatgatgcctttgcagcatcttattgcaagagagtgatattcatcaaggatggaaaattattcaatgagatatataaaggtgatagagatagaaaaggtttttatgaaagcatattgaaagtactctcagttattggaggggaagcaaatgacattatgtaagatggcattaagaaatgtaaaaagcaacttcaggaacttttgggcgtactttctaagcacatcctttagtgtttttgtaatatatatatttatagctatagcctataacaaaaatgttcaagacagcttaggtactatgaagtctgtaaaaattatatttaatatgggaactgttttgataataatattttctacattttttatttggtactcaaactcatttttgacgaaagcgagaaaaaaagaatttgcaacgtatatgctccttggaatgtcaaaagagcaagtagcttggcttaattttattgaaaattttattataatgatagtagcttttttaaccggaattatttttggagttgtatttaataaggtgtttgtaatgcttctgtttgcacttatgagaactgcgggtagagcagtatttcaatttagttttaaagcctttgagatatcatctatagtatttttagtgatatttttaataataagcttacaaagttatcttattatatgtaagagtaaattgatagatatgtttaatgcagccaagaaaatagaaaaaggtttgaaaatatcttttataactttagtaatgagtattattgcagtcatttgtataggctacggatactacattgcaatcaaaaaactagggtataaaatatctttagcaccagaagctgtacttcttatttcagttggaacgattttatttttttcggctataattgcagttgctatagatttaatgaaaaagaatcatagatacatttttaaaggtccaagacttataacagtgtctcaaatacatcaaaggtatagaggaaatgtaggaagcttaagtgtaataacaataacaactacaattgcattatgcgcacttttattttgctttggtggattttctaaagccatagaaaatgctagaaatttaagtcctctatcagtagaatatattaacggaaattcaaatgtagacaatgcttttaacaatatagtagaaaaacataaagaagtgaatattgatcacaaagttaatatgaagttcattgttgtaagtgcaaggctaccattttataatcaggattccaacacgtttgtaataaatcaaagtgagttcaataaaattagaagctatgagaattttgatggaaaagtgaatttaaaagacaatgagtgtttttattatcaaattcaagtattcaatggaaatcctaaagatgtaattgataaaaaggcaaaattcaaatttggaagtatggactatagtttaagagtaaaggatactgatgataaatgttttatatcattagatcattctaaaaatactattgttgtaagcgataaggtttataatagaatgaaaaaggaaggcaataatgagagtttctttaatatcacaggatacaaactaaaaaatgattttaaggcagataagtttgtagatgagcttcaagagaaaatgcctaaagaaaacagtttaactacattttatgagcactataccagtggtatgaagttaatgggcataatgggctttataggattattcatagggatactttttataatggcaacaggaagtataatatacttcaagatgtatatggaatcaagggaagataggaaaaactttataacattaagaaaggttggagtaagtaataatgaaataacaaagtcaatagcaaaagaacttttagttttgtttggggcaccgtttgcattagcaactttaaattgttatgcagcatcattttctataagcaaaatacttgatcttaaaataataaaaacatatatagtcattgagttggcatatttattaatttatagtatatactatttcttaacattaaaaacttatataagaaatataaaagaataagaaaatatcaatataaatgttatatcttagaatttaatattagaacatagacttgaaaattataggtgggattgtctacctataattttcaatataagatataaggttccccccttactattatattttaaaagcgaatattaaataaagttccaaaaggcaaataaccattagatctcgaaagtttatccatttgagtcaatattttataagctttatctccaacagtgactttttcaataaaaactacttgataaattccactaaccacatgtttcaaaacaacttgaggaatttgatctttgttcaattcattttgtcccttcaatataacttcatcaatgattttgtttttaggttcatatatgtctttaaactcatttaataaaagttttgcttgttcctccacctttatctttttctttttcattaaataatcaccttactatctttaaaattatgctctaaattattgtttagtagactatagtttttgataattattatagcataatttgcaaaatatcacatatcattagctctctattctttaagtttttttgtttttatatatgaatatgctacattacctttagacataattagtagaggtattctttgaagactttaaaatatatctttatctactacgatatatctttagaaacacaaaagtatattttttccttagaaaatctaaattctttatccttttgttctacttaagttatttgtggatctaaaaaataaggtctgttaatattagcaatatttattctgtcatataacctatttaactaataaatatctatttttaacactaatttaaaacatagtcttatatcaagttactgattataagtcgatttaaggagagttttgtatgaaaaccataataaactccccctatagtatcatggtatttaaaatagagcaatgtgaagtatggtgtagatatctataattatttttatataaataagaaaccatagttaacaacgtgtcaaaaaacatgttattatagttaacgttgtcaggaaaactacttatcacttacaaatttgataaaaagatgttgacaacaaagaaaaaaaatgttattctatataagctgtctagtgcagcgaacaattgaactttgaaaattaaacagagaattaaagaaccagcaattcttttgaatagaatttattctatttaaataaatttagcgatgagctaaaggaatacagattagcatctgtattatatcaaacttttaaattgagagtttgatcctggctcaggacgaacgctggcggcgtgcttaacacatgcaagtcgagcggggaacttcggttcccagcggcggacgggtgagtaacacgtgggtaacctacctcatagtggggaatagcctttcgaaaggaagattaataccgcataatactcgagaatcgcatgattcttgagccaaaggatttattcgctatgagatggacccgcggcgcattagcttgttggtgaggtaacggctcaccaaggcttcgatgcgtagccgacctgagagggtgatcggccacattggaactgagacacggtccagactcctacgggaggcagcagtggggaatattgcacaatgggggaaaccctgatgcagcaacgccgcgtgagtgatgaaggtcttcggatcgtaaaactctgtcttatgggacgataatgacggtaccataggaggaagccacggctaactacgtgccagcagccgcggtaatacgtaggtggcaagcgttgtccggatttactgggcgtaaaggatgtgtaggcggatatttaagtgagatgtgaaatccccgggcttaacttgggggctgcatttcaaactggatgtctggagtgcaggagaggaaggcagaattcctagtgtagcggtgaaatgcgtagagattaggaagaataccagtggcgaaggcggccttctggactgtaactgacgctgaggcatgaaagcgtggggagcaaacaggattagataccctggtagtccacgccgtaaacgatgaatactaggtgtaggaggtatcgactccttctgtgccgcagttaacacaataagtattccgcctgggaagtacggtcgcaagattaaaactcaaaggaattgacggggacccgcacaagcagcggagcatgtggtttaattcgaagcaacgcgaagaaccttacctagacttgacatctcctgaattagtccgtaatggatgaagtcccttcggggacaggatgacaggtggtgcatggttgtcgtcagctcgtgtcgtgagatgttgggttaagtcccgcaacgagcgcaacccttatcattagttgctaacatttagttgagcactctagtgagactgcccgggttaaccgggaggaaggtggggatgacgtcaaatcatcatgccccttatgtctagggctacacacgtgctacaatggtggggacaaaaagatgcaataccgcaaggtggagcaaaactcaaaaccccatcccagttcggattgtaggctgaaactcgcctacatgaagccggagttgctagtaatcgcgaatcagaatgtcgcggtgaatacgttcccgggtcttgtacacaccgcccgtcacaccatgagagtcggcaacacccgaagcccgtgaggtaaccttttggaaccagcggtcgaaggtggggttgataattggggtgaagtcgtaacaaggtagccgtaggagaacctgcggctggatcacctcctttctaaggagtcgacatggaaatgtaatttccatgaaggttctttgttctctgtttaattttgagagtttaattctctctaaatttgtactttgaaaattgcatagtaatcaatatagagtaatactctaaagcaaggcaaagttaattctttgttgtttgaatttaaatatatttacttaaggtcaagctacaaagggcgcatggtgaatgccttggcactaggagccgatgaaggacgtgataagctgcgataagcttcgggtaggcgcaaatagcctgtgaaccgaagatttccgaatgaggaaactctcatgggtaaccccatgaactgtatactgaattcataggtatatagaggtaaacccggggaactgaaacatctaagtacctggaggaagagaaagaaaaatcgatttccttagtagcggcgagcgaaacggaaagagcccaaaccggaaacttgtttccggggttgcggtcagatcattaaggctttatatcttaaccgaagatttctggaaagttaaaccatagaaggtaatagtcctgtaggtaaaaagagaaaaaagcccgatctgtaccagagtaccacgagacacgtgaaaccttgtgggaagctgggaggaccacctcccaaggctaaatactacctagtgaccgatagtgaagaagtaccgtgagggaaaggtgaaaagaaccccaggaggggagtgaaatagaacctgaaaccgtgtgtccacaaccgatcaaaacacgttaatgtgtgatgatgtgctttttgtagaacgagccagcgagttacggtatgcagcaaggttaagcacttaaggtgcgcagccgaagggaaaccaagtctgaatagggcgtatagttgcatgctgtagacccgaaaccgggtgacctatccatggccagggtgaagcggaagtaaaattccgtggaggcccgaaccacaatggtgttgaaaaaccatgggatgagctgtggataggggagaaattccaatcgaactcggatatagctggttctcctcgaaatagctttagggctagcgccatgaatgagtaccggaggtagagcactgaatgaggtaggggctgacaacagttaccgaactttatcaaactccgaatgctggatacttgaatcatggtagtcagactgcgaatgataagatccgtagtcaaaagggaaacagcccagatcaccagctaaggtcccaaagtatagattaagtggtaaaggatgtgggatttctaagacaactaggatgttggctcagaagcagccatacattaaaagagtgcgtaatagctcactagtcaagagatcctgcgccgaaaatgtccggggctaaaatctaacaccgaagctgtgaacttgtacttcgtacaagtggtagaggagcatcctgtatgggctgaagtcgtaccgaaaggagcggtggactgtacaggagagagtatgctggcataagtagcgagaactaagtgagaatcttagtggtcgaaaacctaaggtttcctggggaaggttcgtccgcccagggtaagtcgggacctaagccgaggccgaaaggcgtaggtgatggacaatcggttgatattccgataccgcagagtaacgttatgagaaatgggatgacgcaggaggataggatatgcgtacgttattggaagtacgtctaagcactgaggatgaaagataggaaaatccgtctttcgttaagtctggggtgtaatggtgaggtagtttactaccgaaatatctgatttcatgctgccaagaaaagtctctatccaggagctctgtgcccgtaccgcaaaccgacacaggtaggtgaggagagaatcctaagaccatcggaagaattgctgttaaggaactcggcaaattgaccccgtaacttcgggagaaggggtgcctacgagagtaggtcgcagagaataggcccaagcaactgtttatcaaaaacacaggtttctgctaaagcgaaagctgaagtataggagctgacgcctgcccggtgctggaaggttaaggggaatgcttagcgcaagcgaaggcatgaacttaagccccagtaaacggcggccgtaactataacggtcctaaggtagcgaaattccttgtcgggtaagttccgacccgcacgaatggcgtaatgatttgggcactgtctcaacagcaaatccggcgaaattgtagtgcaagtgaagatgcttgctacccgcgattggacggaaagaccccgtagagctttactgtatcttagcattgaatctcggtattgtctgtacagaataggtgggagacttggaagcagttccgtcagggattgtggagtcgtctttgggataccaccctgacagtactggggttctaaccggaggccatgaaactggtcacgggacatagctaggagggcagtttgactggggcggtcgcctcctaaaaagtaacggaggcgcccaaaggttccctcagcgcggttggaaaccgcgcgtagagtgcaaaggcagaagggagcctgactgcgacacaaacaagtggagcagagacgaaagtcgggcttagtgatccggtgacacctcgtgggagggtcatcgctcaacggataaaagctacctcggggataacaggctgatctcccccaagagtccacatcgacggggaggtttggcacctcgatgtcggctcgtcgcatcctggggctgaagtaggtcccaagggttgggctgttcgcccattaaagcggcacgcgagctgggttcagaacgtcgtgagacagttcggtccctatccgtcgcgggcgaaggaaatttgagaggagctgtccttagtacgagaggaccgggatggactgacctctggtgtaccagttgtcttaccaaaggcacggctgggtagctatgtcgggaagggataaacgctgaaggcatctaagcgtgaagcccacctcaagattagatttcccataacataagttagtaagacccctgtaagaacaacaggtgataggtcagaggtgtaagaatggtaacattttaagctgactgatactaataggtcgagggcttgaccaatataaaggtaaatatattaagattactatgcaattttgaaagtacaaatgctttcaaaaactaaataaattaatccggtgaccatagcttggttgtaacacccgttcccataccgaacacgaaggttaagaaccaaagcgccgatggtactgcaggggcagccctgtgggagagtaggtcattgccgggtaatgtttggccagatagctcagtcggtagagcagaggactgaaaatcctcgtgtccctggttcgattcctggtctggccaccaaaaactcaagtttatacttgagttttttttattttaagtataatatataaattatatattatacttaaaatttgctaaaggtgggaaatgtaatgaaagttaaaatgtctgagtttttaatagagaaaaaacagatcataaaaagactgatacaaatactaactaaagattttaaatatgtttctgttttaggtacggattctcatggaaaaagatatatagtgcagaaaacaggtgtggaaatttctgattcattttggaatgaaagaggttttgttgtaagggtatacaatggcacaggatattctgaatattcatttaatgaattagatgaaaacaatatagatgctttggcacaaaatataaaaaacagggtaaatgcacaaatagaaacgctggataaaaaatttaagataactaaatataatgtaattaatgaaaacaaaatagaagatagttttttaggagaagttaaaattttacctgaaggttgcagtagccaatatataattgaaaggcttaataaaataaaagacaaagccttgaatatctctaatcttataattgatgcaaaggcaatatttcatcaggttcatgtatcaaagatttttatttcaaataataaggacttataccagtcttatgtgtggagtgaaggatatgtaaatgttttatctagaaagggaaacattacaaggtctaattattcctcaagctcagggttaaatggtcctgaattattggatgaaatggatactaaggttgagaatacagttgatatagcaattaagttattggatgcagaggcagtaaaaccaggtgaatatgatgttatttgttctcctgaagtatcaggtataattgcacatgaagcttttggacatggagttgaaatggacatgtttgtaaagaatagagctaaggcagttgaatatatagataagcctgtagcgtctgaacttgtaacaatgcgtgatggagcgagaagtgcaaagcatgtgtcgtcatatttatttgatgatgagggggttatgggaactgacactgtgataatacaagatggaatactaaaaacagggctttcagacacattatcagctatgaggctaggtactaagcctacaggtaatggtaaaagattttcatttgagagaaaaacttatgctagaatgacaaataccttttttgtagagggaaaggataaagtggaagacatgtttgcttctataaaaaaaggttatttactagattgtccttatagtggtatggaagaccctaaaaattggggaattcaatgtatgcttaattatggattagagattaaagatggaaaactaacgggaaaaatagtttctccagtagtattaacaggttatgttcctgatctcttaaaatcaatttctatggtttctgacaaaattgaacttgcaggaagtggagcttgtggtaaagggtacaaagagtttgccaaggtttcagatggtgggccatatattaaagcgaaagtgaggttaggataatgataaacaaaataaagaatatattagaaagtaaaaatattgatgaatataaaataatagaggaaagaataagttctgaagaggcgttttttgtaaaatcagatattgatatgactagaagtaaagatgtacatcattttaaggttactgtttataaaaattttgagcaggacaaagctaaatatacgggaagttcttcttttaatatagacccaactatgaaaatagatgaaatagataagacaatcgaggatggtatttttgcagcaggttttgtaaaaaatgagtactacagtattcctaaaattaaaatcgaaaaaatagaaaatgttaaaagtaagttttcagaagagacgttatcttactggatgccgaaattagctgaagcgctgtataaaaacgacaatgaaaaaaatggtggaatcaattctgctgaaatctttttaaataagaattacaaaagaatagttacatcttatggagttgatgctagctatgaaagctatgaaggtatgattgaatttgtaacaacatggaaagaaaaagatgaagaaatagaattatacaaaatgctaacattttcagattacgatcctaaaactatatctgaagctgttaatgaaatgttatttttagcaaagcagagagctatagctaaaaacacggtgaagtctggaagatataaggttatattaagcggaaatcctgtgaaggaagttttaagttattatgttgataagacaagtgctgcaaatatttataacaaaatatctacactgaaagttggggattcaattcaaggagataaggttaaaggggatcttataaacttaacgttggatccaagggttgaaaactcaatttactcagcacctatagataatgatggattgccattatctagaatagatattattaaagatggaaaattagaaatctatcatggtgatttaagacatagctattatttgaaaaataaagctacaggaaatattaaaaattttgttgtaaatggtggaagtaagactatagatgatatgaaagaggagccatatttagagcttgtaacattttctgattttcaaatgaattctactacgggtgattttgggggagaaataagacttggatggtattatgatggagaaaaaaccatacctataacaggaggctccttaagtgctaatatatcagacatagatgacaatatattcttatcgaaagaaatacaaaaagagagtggttttgtgggacctaaggcaatagaaatgagcaatgtagtaatagcaggtgaatgatggataaaaagtaccagcctaattaatggctggtacttttttatgacagcatgtgtgtttgtgttcatatatgctttaatgtgaaatttttttaaaaaaatgtattgacaatatgcttgaatccgtttacaatataatcaaacaaacaaatataaacacaagcactcgcaaatgaatatatgaaaggtgatttatatgtttgcagaagaaaggcaaaaagaaataaaagctattttagatagagaaggtagtataaaggtaaatgaattatcagtccattttgatgtttcagaagccacaataagaagagatttaaaagaaatggaagatagaaggattctcaaaagaacacatggaggcgcagttccaattgatataactaattttgaggcgtctttcgttgataaaaaagatgagggacaagttgaaaagttggctataggaaagtatgcggctaatatgattaaaaatggggatactataatattagattcaggaacaactactcttgaaatagctaaaaacatagatgcagaagacataacagttataacgaattctattgatatagcatcagaattattaaacagaaaagataaaaaaatcgagctcatagtagctggaggaattttaagacctaatactagagcaatggttgggaatttatgtgagagtgtatttaagaattttagggttgataaagcttttattggagcaaatggaataacttcaatagagggaataacaacaccaaactttactgaagctcaagctaaaaaagcaatgataaatgcagcgaacaaagtaatagtagtcgcggatagttctaagtttgaaaatatttgtttctccatgatttgtaaggcagaatatgctacagcaattgttacaagtggggaattatcagaagaagatataaaagattttaaagatttgggagtacaaataatagtcgcataactggaggtgaagtcatggtaataactgtaacattaaatcctgcaatggataaaactcttaatattgataactttaatgtaggagttgtaaatagagtaagtaatataaggtatgatattggtggtaaaggaataaatgtatcaaaagtattgaaaaatttcaatatagagtccaaatgtactggttttattggtggtatgtgggagaaagatttcagagaagagttagataaaagaggaataaaaaatgaatttataactgtaagtggaaatactagaacaaatactaaaattgtagacgatttaaataaagtatatacagatataaatgaagcaggaccaagcataagtagtaaagaacttgaaatgtttatgaataaattcaaagatatgtgcaataaggatgacatcgttgtattatcaggaggagtagctccaggtattccaaagaatatatacggaactttaacaaaaatagctaaagaagagggttcttttgtaatcttagatgcagaaggagagcttctaagtgaaggaataaaagaaaatccgtatatcataaaacctaatgatatggagtttgaacttcttttaaataagaagtttaagaataatactgacattatagatggagcaaaagaagtaattggattaggagtttcaaatgttttaatatcactaggatctaaaggagctctgtttgtaaataaggataaatcatattatgctaagggtttggtagttccagttaagagcacagttggtgcaggagattctatggtagcagcatttgtatatggaattataaatagtcttaatgagaaagaaatattaaggttttctatagcttgtggagcggcatcagtttcaactgaagggaccgaagcttgcagcttggaggatgttaaagaattattaaaaagtgtagttattgaggaggtataatattatgtcaactaaggatatgttttcaaaagaaagggtcacatttaatcttaaagctaaaactaaggaagaagccataaatgagcttatagaaattttatataatgacggaaaggttactgataaggaagaattaaaaagagctgtattaaaaagagaagaggaattctctactggtataggtatgggaatagctattccgcatggtaaatgtagtgcagttaaagaggctgctataacatttggattaagcaaagagggaatagactatcagtcaatggatgataaaccagcgcatttattctttttaatagctgttccagaagaatctagtgacatacatcttaaggctttaagtgaaatatcaagaaaacttatgcatacagaagtaagagaaaaaataaagaatgcccaaagttttgaagagtttataacagttttcgaataaaaaataaaattattatcattataataagtgtttatactaaattatataataagggaggaaataaaaatgaaaaagttagttgctataacatcttgtccaacaggaattgcacatacgtacatggcagcagaggcacttcagatggcagcagaagaaatgggtcataaaataaaagttgaaactcaaggttcggtaggagcagaaaacgtaataactactagtgatgtaaacgatgcagacgcagttattatagcagcagatactaacgttgataaatccagatttgctggtaaggtattaatagaagttccagttaaagatgctataaaggatccaaagggacttataaatacagcacttagctcaaacaaaatatacggaaacagtaatgaaaaatctaaagtagaagagaaaagagaagataagggcagagcttcaggagtatataaacacttaatgacaggagtttccttcatgataccttttgttgtagcaggaggaatacttatagcactaggatttgcaatcggcggaatatatgttttcaaaacaccaggaacaatcggagagacaatatttagtacaggaaaacaagcatttgcattgatgttaccagttttagcaggatatatttcattctctattgctgacagaccaggacttgttccgggatttgttggtggtgctttagcaagtactataggcgcaggatttataggagcgttgctagcaggttttatcgcaggatattttgttgtactattaaagaaatatataaaacttccaaaagcacttgatagtttgatgccagtacttataataccagtactttccacattatttatagcactcgtaatgatgtttattctaggcgacccagtaaaagcaatcaataatggacttacaggtttcttaaagggattaagtggagcaaatgcagcagtgttaggtatagttttaggatgcatgatggcatttgatatgggaggtcctttcaataaagcagcatacgtattcgctacaggaacaataacaactacaggaacaactataatggctgctacaatggcagcaggaatggtaccacctcttgcaatagcacttgcaacagtaataggaaagaagaaatttaatgagcaggaaagagaagcaggaaaagcagcatgggcacttggattatcattcataacagaaggcgcaataccatttgcagcagcagatcctcttagagttattccttcgatgatggcaggctcagcagtaactggagcattatcaatgatatttggttcaagacttgcagttccacatggaggagtatgggtattatttatacctcatgttgttacaaatttaggaggatatataatatcaatactagtaggtatggtagtatcagcgttattacttgtagctttaaagaaagacatagtaagaaaataataaaattatttaataaaaagaatgttgctaatagcagcgttctttttgtttttcggtaaatcatgtatgaaaatttgattgttaatatgcttaataaaactgtagagggatttgaaaaacttctaggtcattagatatggtattggacttttctagaaaaaatattttgtggggttattaaacatttcttgaatgatgttaaaaaaatgtcctgcatgaacaccatcaacaactgcatgatgagcttgcacagaaaatggcaacttaacctttccattctcattaaaaaacttcccccaagctattcgcggtatgctatcagtagtatttgtgttaattggatggcttatgctggtaaaggaaatccaaggtatacttgttgtgtataatagatcatcacgttttttatcattctttaagcaggtattgagctttgctttttcaatttcttttaatgtattatctttaaaatcagtatagttttctatgaacttagcatcacaaaagttgaatacctctccttcagtcattatagtaaaagaaggatgtacaatttcatgttcaattaatttatcttctcgtattctaagtcgaaattcttgtataccattggcagttttagttgaagcatatagaaccgatataaaaaaaggcaatttattttcttttatgtaattataaaagtttgtaatatctaaatttgcacatatattaaaatgagggtaatcaagatttctaaaatagttaaagtgatcccgtctcttccagtttgacatgtctatatatttcatatatacaccactcccaataaaaaattaattaatgaatataaagtaattataacattgattattgtacacaatataaattcaactttgaatattttaacattacagctttttatgttaatcagagtctgataaaataaaactataaagttaaaaagggtggtaactatgcttctagaaataaaaaatttagttaaaaggtatggagattttttagcagttgataatgttaatttaagtatagaagaaggagaaatattagggcttttgggacctaatggtgctggaaaaacaactataatagattgcataataggattaaataaaatagattctggaagtataagaatttttggaatggattttctaaaaaatgagatggctataaagaaatctataggaatagtaactcagactatatctgtgtacgatgatttaaatgtatatgacaatgtaatgtattttggaggaatgtatggtcttagaggaaagaagcttaaagagtacgcaagagaagcattaaattttgtaggaatttgggataatgcaaggaagtttcctaaacagctttcagggggtatgcttaggaggcttaacatagcttgtggaattgtacataaaccaaagcttataatcatggatgagcctactgctggtatagatccaaagtctagaagcaatcttttagaatcaataaaggagctaaacaaaaacggtgcaactataatttatacttcgcattatatggaggaaatagagagaatctgtagtagtatagctataatcaatgaagggagaattattgcaaagggcgataaagaggagcttaagagcttagcagcaaaggaagaaaaaattaaaataaagccgtcagcattaaactatactattgtggatgaaataaagaaaatttacggagttaaagaatgtagtataaatgcagattatatcgatatagtttcggataaaaatagtaagaatatagctaaaataatagacatgattgtggggtctggattagaggttttagatgttatcattgataggcctagcatagaaacagttttcttggcccttacaggaagaaatttggataattaaatagataggtggtaatcatttgagaatattacatatagcctactacatctttaaaaaagaatttaaatctagcatagtaatgatgataatatttcctatagctctaatagctattttgggaaattcacttaaaagtgactttagtggaggtataagctatcaagagaatatagaagtttatgccgataataaggggagctatcaagagatagataattttataaaaggtagtgaggcttttagaaacaagattaatataataaaagctaattctaataaaaaagcaatacttgatttggaaaataaaaaatatgatgcctatatacatgtagatgataaaaacatgctaaagctacatgtaaaagcagacaagatagattcttttgattattcaataataaaaaattttgtttatagttgtgcagaagacttatcaagcaaaggatacaagaatggtaatgaaaatacagtctcaacaattaattttagtaatcaatcatttagctattattcagtaacaatgcttgtcatgataattttgtatggaactatatatggtattaatgctataagtacagatagaaacaagaatattagagaaagaattggtagtttacctattaaacaaagtaacatggttttaggaaaaatgatgggacttgtattagttattatattagatgcttcaattgtgtttttattttcaaaatttgcttacggaattgatcaaggaaataattatatagcaattttagctgtgatatttttatattctttttttgcgatagggttaggaatgtgtatagaattaataatatcaagtaaagaggtgtcaaagtatatagttgagatattaatacctatatttacaattctatcaggagggtatgttagtaggagaattttaggagataaattaactgaattcagtatgttttctcctagttacgcagctcaaaatataatttttaatgctatatatgcacttaatataggtaccaagatgttttatattgaacttataatcttagatcttattttagggacactagtacttattttagcaaggaggcgattaacttgaatattatactctttggaataaagaggcttatgaataaaaagagaatggtaatatttgtttatctccttcctctgatattttcaatttttgtaatgaatattagtacgtcaaaaattaaagtaggttttgtagatgatgataaaactaagcttacaaaaataattagaaataaattagaagataactatgacttagtttgtgtaaaaagtgacgaaagcaaaattgcaattgcaaataattctgttactactgttattgcaatagaaaaaggttttacgaagaatatattctacggaaaggatattaaattaaaattatatactgataaaaaaagtgagtatcataagatagttaatcaaaatatttcaatacttatacaaaatgcacgaaggatttattcaatctcaaataaaaacgtaaatatcttctataaaaatatatctaaacccatttataaaactcaaataagcaactctaccggtaaaatgaaacagcagggtacaatatcaattatgtttaattttctagtcatgtttttacttttaaattcttgtattttttcaagaagtgttataaatgatgatagaagaatttttgcagcaccaattagtgtaagaagctatgttcttcaaaacctaagccttttggttttggttgatattattcaagtacttttagtgtttgtagagattactatattgtatggaagcataatatttcagtattttctaccgcttttactactgtttttatcggcatcaataatgtcagttacatttgcaatgcttttgaatggagtattgaacaaaacttggcaaacatcatttagtattattccaatgtgcatgcttggagggtgcttttggggaattgataatatgccaaaggagtttcgatttgcagcacagtttgtacctactaagtgggttgttgatggtataaataatatattaatttacaataattataaagtattaaatatggacatcttaataattctgttatttgcaatagcatttttgtttactgggactattactaaaaaagatgtaataaagtaaagaggtttatatgaataataaatttttgattatcttaaaaactatattttttttatatgtcttgattcagctttgtactaatggtgttggtggaggtattatagtaataatatttttaaccaatgtaattctctttgtcctaaaagaaagatttctcaaattaaggtatggtgcagttgtggaacttatcagtgttataatatcaggactctttaacagttattttgtatttttacttcctggcgttatatttgatttagtttatgatgaattttatttaggaatagcgttggctttgataggtattatatattttagagagtacagcaacttgaatttttcggtattttgtttgatatcaggtatgcttgcatattgcttgataaatatgagaaaaagagaagaactatacaggaagacctttgatgatgaaagaagattagtatatgagcttgaaaatgctaaaacaaggcttatgaattcatctttagaagtagcacatatggctgagataaaagagagaaataggattgcaagagatattcatgataatgtaggacacagtatagcaggaacttatatgcagcttcaagttgcactgaaattatatgataaggatagtgagaagtcaaagaaaattttaaaggaaagtacagaaaggatttctgaagccctgacacttataaggaatacagtgcataatatagttcctaaggagaaggtaggaatagaatatataaaaaatataataaataattttaagttctgtagtgtggatttttcatatactggtagtgaggaattggtgtctgcaataaatatgcagattatagccttgaatgtaaaagaagcacttacaaatgcattaaaatattcagcagctaccaaggttattgtaaatatagacataaatgataagtatataaggctttacataaaagataatggtgtaggttgtagtaagatgaaagagggactaggtataagcggtatgagagagaggatacgaagcgtagggggaagtatatctacaagtggagagaatggatttttaatagtatgtataattcctataaataacgggggaggaaaaatatttgaaggtattaatagttgatgatgatgctcttataagagaaagtcttagtatacttcttgatttggaagatgaaatagaaataataggtacatgcgccaatgggcaggaagcttttgatttttgtaaaaataacagacctgatattgttttaatggatataagaatgccaattatggatggtgtacttggaactaaagttattaaggaaagttttaaagatataaaggttgttatacttacaacttttaaggatgatgagtatataaaagaagcactgaaaaatggtgcagaaggatatattttaaaaaatcaatcctctgatagtataattgacagtttaaaggcagttgtaaatgggaatatggtgtttgaacaaaatgtggcaaagaccatatcaaattttattaaggaagataaaagtaataatgggttagaacagtataatcttacagaaagagaaatggaggtacttagaaatataggagatgggctttcgaataaggaaattgcttcaaagctttatttaagcgaagggactgtaagaaattacattactagtttgcttgaaaagcttgagcttagggatagaacacaacttgcaatattttatttaaagaatagttgattttgtaaaaggagcttcgttaaattgcgatgctccttttattcatttatagatatgacaaatgtcattatgatttatgaacaaatgcactattttaggtatgtaaaatctaatatcatatgagtatagaaggaaggaacttgaacgaagaaatttaagtttggaggaattgtagatgatattagaaattaaaaatcttaagaagacttataaggagtttacagcagtagatagcttgaatcttaaaatagaagatggtgaaatttatggattgcttggaccaaatggtgcgggaaagtctacaacaataaatacaataacaggattaacaaaggttgatagtggagaaattaaaatatttggtaaaagatttaatggaagcgatacaaatataaaaagaaatataggagttgtaccacaagatatagctgtttttagtgaattatcagcttatgagaatgttgccttctttggtaaattaaacggtcttaggggagcagttttaaaagagagagttaaggaagcacttgattttacaggtttgtgggatagaagaaaaagtaaaccaggtcagtattcaggtggtatgcagagaagacttaatattgcttgtgctatagttcatagacctaaattaattataatggatgaaccaacagttggaattgatccacaatcaagaaatcatattttagattcagttaaaaaattaaatgaaatggggtccacaataatatatacctcgcattatatggaggaaatagagacgctttgcagtaaaataacaattatagatcatggaaaagaaatagcgacaggaactaaagaacagctaaaagagatgatatcaaatgaggaaaaggttgaacttgaattatcggaggttacagatgatttagtagaagctgttgaaggcataaaaaatgttaaaaagtgcagaagaaatgaaaatatgttggtgattgtttcagataaaaacagcgaaaatataagcacaattacggcgaaaatagcagagtttaagagtaaaattatatcaataaatgttgaaaagcctagtcttgaaggtgtatttcttacacttacgggaagaaaacttagggattagggggaggtattatgaacgttttttatattgcaattaatactataaaatcaaatatatcagataaaaaaactcttataatgatgcttttaatgcctatagttataattttaattcttggaaatgcacttaaaagtgtagataatttttctgttacaaatttaggtaagacaacagtatattattataatgctgataataaggaaatatctaaaaactttgatgaattcttaaaaaataagagcattaaagatatattgaatgtaaaaaaagtaagctcatataaaaaaggaaaagaacttgttgataaaggagaaggtaattctcttatatatataaacagtaattattctgataatattgaagctaataaaaagggaagaattgagatatatgaaagcaaaagcagtactacaagaaatcagattataaaaagtttaatagacagttttaatgatggtgcaaacactgttgaagtatcttctcaaatatcaaggatgagaacaagctatgttgaaaaaaataatataagtaaaaaatatctaagtgtaaatggaaagtctccaagagcaatagattattattcagtaacaatgcttatgatgatattactatatggtgcgaattacggaagtgcagaacttgaaaatctattctttgatagagttggaaagagaataaaaacaacggccacaaaaacctatcagcatttactaggtgtagttttaggggttatttttacattgatacttcaggcagtagttcttgtgctatttacaaagtatgtatatggagcaaattggggagggcatcctatattagttttgggaatagtttcatcctttgcaatattagcagcatcaataggctttttgtttatgattataactggggatgacaaaagagcatcaatgttaataagtgtaacagcgcccatatttacttttgtatcaggtggatatgtgaaagttcctttttcagatggaagcataataaaatatgttcctaataatcttgcacaatcaggattatttaacatgatatacaaaggggttacaagtacggcggaaaattcaataataattttacttgggatgtctattgtacttttagctatagcatctattgtaggaaggagaagagtagcatgacaatattttttaataatataaaaagaatatttagaaaaaaagctaatataatagttatgttcctatttccaatactttttatttcaatcatatcgtcgatttcaagtggaggatccggatttacagtaggtgtagttgataatgacaatacaaagcttacttcaatgataaaggaaagaattaaagctaatggaacgataaaaatagtgaataaaaaagatataagtgattatataatagataaaaaaatagatatggcaattgtaataccaaaaggattaactaaaaatattataggtaattctaaaggagaaaatattgagatatacggaataaaaggtacctcaaatgattcgtccatggagtattacgttaatagttttgtaaacgcagctcaaaatatagctaaagcagctaaaggtgataaaactaagttttataatggagttaagaattatcaaaaaggaaattttgtatctgagactaaatatacaaatggagaaagagaaaagcaaaagacctcgacgacttccataggttttcttattgcaagtataatatatttaagtactatgataactacacttattctagttgataaaaaggatggagtatataatagaatgtttgctagtggagttaatagatttagatatattgttggatcaatgtttagttttgttgctgtaaacttaattcaaatagcaggcgtgtttttagttatgaagtatgtggttaaaattgatttaggaccttctcctattaagctgtatttagtgcttgtagtctttggtatagcttgtgtatcacttggagttttgatttcaaatagatgtaaggatttaaagcaggcaaattcaatgactgtccttataagtacaccagttgctatgttaggtggatgctattggccaaaagaagttatgggtagtacacttcaaagaataggtgattttgttccatctacttgggctatgaatgccgtagataaaataataaatggcggatcacttagcagcatttataaagaggtaggtattttatgcatattcatagtggtatttctcgtattagcaatggttaaaaaggtagatgttgctaataattaaaaagtataaaagtttatttgaaacatttaaagtgaggaattttaaggagaattttgtcctggaattcctcactttttattctataaaattattgtaataggaagtctaatataatataatgaatacatataataattatcaactaataataaatatcattagagttcgggagggatataatgttagagtttagaatagcttcgaagtttttaagatcaagtaaaggacaaacaatactgattatattaggtattgcaattggagtatctgttcaggtatttatagggacacttattcaaggacttcaaaagagcttagttgataaaactattggaagttcaccgcagattactgtaacgtctgaagataatgatggctcaattgataggtgggaagacaaaattaaatccataaaaaactctaattctaaagttgaaaatgtttctgcaagtactgatttttcagcctttatagataaaaacaataaaacctatcccgttttgataagaggttttgagtttgctaatgctgataaaatttataaaataaaagataatataaagattggaagagagcctaaggatgaaaatgaagttcttataggtatagatttaaaaaaggatgcgtctttaaaggttggagataagattacaatatttacgccaaaaggtgtacaaaaggaagtaaagataacaggggtttatgatcttaagtcatcgagtataaatgataagtggattcttacaacactaaaaacatctcaggatatgtttaactatggagataaggttacggctattgaaatgcaggttaaagatgtatttaatgcagatgtcatttctaaggatgttaaaagctcattaaatcttaatgatgtaaaaatatcaaattggaaggattcaaatgcatctcttttgagcggattaagtggacaaagtgcatctagtataatgattcaggtattcgtacttgtttctgtggtcttgggaataactagtgtacttgctataacagttatgcaaaagtcaaagcaaataggtatacttaaagctatggggataaaggacagtgcagcaagtagaatatttttatttgaaggacttattttaggaattttcggtgcagtaattggagttgccctaggtcttgggtggacatattccttcactaaatttgcagtaaatccggatggaacaccagttgttccactttatttagattacaaatttatagttttctctgttgtcatagccatagcttcagcttgcatagcagcgattataccagctagaaagtcttcaaaattaaatccaattgaggtgataaaaaatggctaatattgtagagcttaaaaatgtgagtaagacttatgggaagattataaaaacaactgttcttcatgatgtaaatttaggttttgaagaacactcttttaactcaataataggtgcttcaggaagtggaaaaagcacaatattaaatattatgggaacattagataaaccttcaacaggagaggtatatataaagggaaagcgtacggatactatgaataagaatagtctagcagagcttagaaacaaaactataggttttatatttcaattccattaccttttgcctgaatttacagtactcgaaaatgttcttatgccataccttattggaaaagcaagacctaatgaaaaagtaattaaaagagcagaagagctgctataccttgtaggaatagaaaaggttaaagataatttagctactaatttatctggaggacaacagcagagaacggcaatagcaagagcactattaaataatccagatattgttttggctgatgaaccaacaggaaatttagattccaaatcaactgaaagtgtttataaacttttaagagaaataaataaagagtacaatactacatttgtaatcataacccatgataataggatagctgaaaaaactgatagaattataaatataaatgatggaaaggtttgtggtgaatttacacctgattcctataaaaaatctatttttgtagtataattactgtgtattatagataaaagtttgaggaggcatatttatgtctgagtttataatctacgcagtaattggaattgttgctggtgttttaagtggtttgtttggtataggtggaggagtagtaataattccggcgttagtaatgtttgcagggttttcacaaataaaagcacagggaacatctcttattgcaatgcttccaccagttggtattttcgcatttatgcagtattacaaaaagggaaatacggatatatatgcgggaatagttatttgtatagctatggttatagcggctagatttggagggcagcttgcaaacatacttccggtgagtgtacttaaaaaggcatttggagtatttattatattagttggtataaagaccatttttggaaaatagattaaaaattccaaaagtggtcgcttctaaatcagaaagccaatatatacctaaaaatatgttgtggctatccgcaacaaaaatagcaacaaatgaagattttagatatttagaagggacagggaactgtgagggtgatagctattattacgatttaataactatatactatctaaacaaaaattttgcaatgccagtaccggtgcttgctgaaatattggatatagaagaaaaaaacataaaagaatgtttttcttcatacttaaatagatatgaagaagaagacaacgaaaactatatataaatattttttaagaggttgttacaaagagagagtgaaaaatagtctgtgtaaacttcatgaagataatataataaattatctaaatgaagggagcatggactatgcctttttctaataaggaattaataaaattaattcttgaaaataatcctgatattaaaacaccagaggatgtacaaaatactcttaaagatttatttgatggtctcttacaacaaatgcttgaagctgaaatggacaattatctaggctataaaaaatatgattataataacaaaaatacatcgaatagtagaaatggcaaaagtaaaaaaactatgaaatcaaatttaggtttatttgatttagatatctccaggtttagtttctgatataactaataaagttattccgttgatttaagattagtctaaacttgatgaactagaacagaaatggggagacaaatatttaattgccataagaagttggagaaataactagactgaactagctacattctttaacattctttaagtatccacctgaaataagaaaaattaacattttcatagatatagttagcttatctatgaaaatgttatattattgaatagatttaaaatataggttggaaaattcatttttcccaacctatctattaaaaaaatatttttttgtggagtttacacaaaagtattgacatactctacaaagaataaaaactgcaatatagtaacatttcttattaccacattttttataaatttgagattaaaatatgtaatttattcatgtaattctaagggtaagccatctggatcactaaaaaaggtgaatttttttccagtatattcgtctaatctaattggttcagtagtaattccatttttatttaattcattaacaatgtcttctatgttttcaacatgaaaagcaagatgccttaaaccacatgcttcagggtatgaaagtcttctaggagctttaggcatagaaaaaagttctatttcactatttcctatttttaaatctagtttataagaatctttatctgatctataattttcacgaataatttcaaaacctaatatgtttacataaaaatttttagaagcttcataattggaagcgataatagcaatatgatgaattgaatttaatttcataataattctcctatcttgtatatagtttacctgttttgtaaaaatcgtagtttattatatcatactcacttaaatatggagtaataatatattttatatagtctaaaaaacttattttttgaaaaatatattattaaattaaaataaagattaatctaataaatgacgatatagatattaagtattgaattaaatatgataattcaattttagaaatgtgacttaattcagcatattcagttggttagggtgtaattataaaaatgcaataactatggataactttgtttttacttaattatattcgaaagtagcttttgaaaaaataggctttaagttgtcgaaaaatgtatataaacagctaaagtatgtaaataaaatttcaactaattaatagatacaagaaaaaacaataaggtgtaaaattttattagaaggggagattgtactatgaataagagagttattggaataaaagggaaggttttaatatcttcaatgttagttcttttgttaacactagtaagtattagcggtattgtaatttatcaagtaaatagtaaagcttataatgattacatggacaattccaatcaacagttgaagacggtttctcaggcaattaatattttttatgatcaattagataagaatatcaatatgttagctacaaatcctgtgataatgaaggctgatagtagcattgaaacatataaaaatacgactcaagatactcaaatggatgcctctgctaaaggaggaattgaaaaagaaatttatgaagtttttgagcagtacggaaaaagtcacgaaggtacgagctatgtgtatatgggaatgccaaatggagaatatgtacaatggcctaaggaaagtgcaccagcaggatatgatccttcaaaaagaccttggtttattgcagctatgaataaaaagggaagtgttattagaacagcaccatatatttataagtcaagtatgcttacaagtaatgcaagttcatttaatgatcaaaatggaaaagttgtaggtgcaataggtattgatgtgcaacaatctgatattagtaatatgttaaataaagccaagattggtaaaacaggttactcaataattgtgcataataaaggttttataatggcagatggaaaaaatcctaaaaataattttaaagaaattaaagatgttggtattactggtttagatcagctattagctaaagatttaaaatcatttaatgttactatagacggtgaaaagtatgttgttaatccatataaagttgagggtactgattggatattagcatcatttattacacaaaaggagttaatgagtggagcaacaaaaataataaatatagtaattatttcagcaataaccatattattattaacatctattttatttaattttgtatcgggcagtataacaaagcctattttagctgttacaaagaaagtagaggatttcgctaatttggatttttcaatagatgaaaattcagaagaatctaaatattacaataaaaaagatgaaacgggaaatatggtaagggcttttagagttatgagggataatgttgcagaatttattaacaagaccacagatgcaactgaaagagttgctgcatcagcagaggaattaacggctacatctaatgaaacagctactgcttcagaagaagttgccaaaactattgatgaaattgcaaggggagctagtgaacaagctaaagatacccaaatagcaacgaataatgtagaagatttaggtaatctattagaacaagatttaaataatatagaggaactaaatattgcagcggttaagattgaaaagcaaaaagaagaaggcttcttgattttgagagaccttattgataaaacacagaaaaataacgatgccgcaaataatatatataatattatcatgagcaacaatgaaagtgcagagaaaatagaaattgcaagtactatgattgaaagtattgcagatcagactaatcttttagcattaaacgcagcaatagaggctgcaagagcaggagaagcaggtaagggttttgcagttgttgcagatgaaataagaaaacttgcagagcagtccaatagttttacaaatgacattaaaactataataaacgaattaaagacaaaatcagagagtgcagttaatttaatggaagaaacaaagcaaattgttaaggaacaagctagtagtgttgaagcaactgaaggaaaattttcaggtatagcagaagaaatagattctataaaaactataattaataagtttaatcaatctggaaaattaatgggggataataaaaataaaattattgagttaatgcaaaatctatctgctatttctgaagaaaatgccgctgggacggaagagacagctgcatctattgaagaacaggttgctacaattcaggaaattgctaaatcaggagaaagcctagcttcaattgcagaagaattaagtgtagtaataagcaagtttaaaatttagaattaaaaaatttaaagctaaaaaggggataatgagtaaagctcatgtcccttttttagctgctaaaaattaattatgaaatagtttatgatgtgttggatagtgataagctaaagagcaaagaagaaataatagctgaattcaaagaaaagtatgacgaaaaagatattgtagaagtatatggtgaattgcaataattaataaaagaggaaggtctctattcagaagatcaatatgaagaaatagctaatagttccatggataacagggattatatcatattcaacataagggttttcatccattagatgtttatactgaaacaaagtctgtcatagcatttggtaagcaattcttagcaagtttatttcaatcaactacaaatgtaccctatacatttgttaaaaataagttagttgaactgttggataatatttctattcaactttctttttatattgaatcaaaggggtataaggcaattcctattccatcagatgaaccttatgaatattgggattcacaaaatagacatggtagagcaatattatcgctaaaacacttggctcaattatctggacttggatttattgacaaaaatactttactaaaagagagaggctgctttaagccctgaatataatgggcttcgcccaaacctccagtggtttacatttctgcgatggtggttccggtttgggttaggtcgtagccacctattcccattagttctgatttaaaggtttcggattggagaatatctatgattgctttaaagggtggcttttctatatcatcttttcttataactaaatcgtatctttctctttgaattggtataaaatctatgttagctacttgaagtccagttttttcatttccaatacctatatcggcaccatttctagaaattatacttgcaatagctagatgagagagactttcgcgtgaatagccatttattttgtttccatcaatatttagtaaacgtagatgttcatctagaagtattcttgttccacagccccgttctctgttaaccattgtgagatcatctcttctaaaatcctcccaaccagttatgtttttgggattcccttttgctacataaaaacccattgttctaaaagccaaatttattattatggtatgaatacctggaactaaccttcgcacatagggaatattgtaatctccagaatcgccatcccataaatgagcagtagcaatttgtattttaccaaaatataaacctagaagtccgctgtaacttccaacataggaacgtagagcagtagtgccagaaggatgaatttgaagatatcgagatagtatatccaaaagtatatcttggccacaaataataaagctaccatttggtatgttgccatttgattgtaggaaattctcattgatattttttcgtgtattttggagtgagtttggggctttttttgtatttgttttacacttatgtttatatagttcaacgtcttttgaatctatacgtatcttttttccaaccctatagcaatttaaatctccgcgttttatcaattcataaactgtatttttagatatcctaagaatttttgctacatctagaggagttaaagttttattttccaatagtatcaacttccttctaaattaaatgtgggtttcatgataaattatcaatataaataatattttaatacaattatgttaaaaattcaattaaatattaattaagtggcaattgtcagtagtaaaaagtatatataaaaatttcaaaattggtttacataatgcaaaaagtttttttacttggagttgttagcaaataacttttatagttcaaaacattttaatagagggttacattaaaaaagaaagtactaaacaggttaaaactaaacagaaaatatcaatacggtaaatacttgtctactcaaaataatatttaaataaacaagaatgaccaaaatggtaaaaaagatttgaaattattttgcattgaaatcgttaatataaaaatttataataaattaatttgataaaaatagctaaaatatattaataaattaataaaaaatgccgttgacacttgataatttctgatatagtatttagataaaccaataaattaattattattggaatttattcaataaaattacacttgtgaggaggaatacacatgagacaggttgctatttatggaaagggtggaatcggtaagtcaactactactcaaaatttaacatcaggacttgcagagcttggtaaaaagataatggtagtaggatgtgaccctaaagctgattcaacaagacttcttttaggaggattagctcagaaaacagtgctggatacattaagagaggaaggagaagatgttgatttagatacaatcatgaaaacaggttttggtaacattaaatgcgttgagtcaggtggaccagaacctggtgtgggatgtgctggaagaggtattataacttcaataaatatgcttgagcagcttggtgcatatgaagatgaactagattatgtattttatgatgttttaggtgacgttgtttgtggtggatttgcgatgcctattcgtgaaggtaaagcaaaggaaatttatattgttgctagtggagaaatgatggcaatgtatgcagcaaacaatatatcaaaaggtataagtaaatttgctaatacaggaggagtaagattaggtggaattatatgtaatagcagaaaggttaaaaacgaaaaggaattattagaggcatttgcaaaagaacttggaactcagctaatttattttgttccacgaagccatgaagtacagaaggcagaaataaataagcaaacagttatacagtttaatcctaaagacgagcaggcagatgaatatagagcattagcaaaagctatagatggaaatgatatgtatgttgttccaaagccaatggctcaagataagcttgaagctatacttatggaatatggattattggaataattttttatgagagagaatgctttgaaaaatcaagaagcatatatcctatggttttaaggtgcacaggagatatgcttgcaaggtatttgaatgttattattcaaaccactacattttaacatggaataggagttggttcaatagtgttaatgataaaggcaattctaagaccgcagaaggttactaacgttttatcagaattaagtgatgctggctttccggcagtaaccaaatttagtgtagtaggaagaggaaaacaaaggggagttaaagtaggtgacatctattatgatgaaatacctaaggaaatgttactgatagttgtaaatgatgaggataaggatgatgttgtaaatataattgcaaaaaatgccaaaacaggtgaaaaaggagcttttggtgatggaaaaatatttatagttccagtagaacaagcctatacaataagttctggaaaagctggtttataggaggcgtaataatgaaagaaataatggcgattattagaatgaatatggttgagaagacaaaagaagcgctccttaaaggtggaaatccagctataacttgtttaaaggttcttggacgtggaagacaaaaagttgatttttctatgattgaagactatatacctaatttaatggatcaaaagatggcagaggagttatccgaaattcataggttaatttcaaagaggcttattattattttagcaaaagatgaggatgtgaaagagattgtggatgaaattattgaagtaaatagaactggtaatccaggagatggaaagatatttgttataaatatagctgatgctatgaggataagaacagaagagactggagatatggctatttaattttatgaaaggattggttttatgaagaatatacctgaaaagatttttgaaaaatatcctgctaagaccttcaaaaatagaaaacagcatatggttataaaaactaaggataatttaaatccagttatacaggccaatgttagaacaatacctggaataataaccaataggggctgctgttatgcaggctgcaagggtgttgtaatgggacctataaaagacatgattcatattacccatggacctataggttgctcttattatacctggggtgttagaaggaataaggcaaaagcagaagatgggggacaaaattttatagaatatgtattttcaactgatatgcaggagagagatatagtatttggaggtgagggaaagctaaggaaggctattaaagaagctgttgaaatctttcatcctaaggctattggaatttatgcaacttgtcctgttggattaataggcgatgatataaatgctgtagcaagagagtcaactgaaaaatatggtatacaggtaattgcttttagctgtgaaggctataaaggagtaagtcaatcagcaggacaccatatagcaaataataatattcttgatactgtcattggaacaggtgattggaagcataaaaagtattctgtaaatatactaggtgagtataatataggcggagatgcttgggagatagaaagaatacttaaaaaaataggctataccgttgtgggaagacttagtggagatggttcctacgagagagttaagaatgccgatacagcggatttaaacttagtacagtgtcataggtcaataaactacattgcagagatgatgtatacaaagtatgggataccttggataaagacaaattttataggtgtaacatcaacaatacaaacgcttcgagatatggctaaggtttttgatgatccttatatttataaaaagactgaggaagttattagcgaggaactttcaaatattgagggtgaaatggcttattttaaagaaaggctagaaggaaaaactgcatgtttatttgttggaggttcaagggcacatcactatcaaatgctgcttaaggactatggggtaaaaacagtacttgcaggatatgaatttggacacagagatgattatgagggaagagaagttatacctactattaaggctgatgccgatagcaaaaatatacctgagcttcacgttgaaaaggaccctaaaaagtatcgtatcataattccagaagatagatatgaggtattaaagcaagagattccacttgagtactatggaggaatgtttaaggatatggaagaaggcgctgtagcagtagatgatttaaatcatcatgaaacggagcaatttataaaattactaaaaccagatatgttcttctctggtgtaaaagataaatatgtaatacaaaagatgggcatcctttcaaaacaattacattcttatgattatacagggccatatgctgggtttaagggtgcagttgtatttgggaaagagttggttgcaggtgcatttactccggcttggaattatgctattccgccgtggaagaaagagcctatgcttgagggaaaagtagtagggggtgaggagtaatgttagatgaaacacctaaggagatatatgaaagaaaagctttaagaataaatccagccagaacatgtcagccaataggagccatgtatgcagcactcggcatacataactgcctaccacacagtcatggttctcagggttgttgctcataccatagaatgcaattaacaagacatttcaaagatcctatcatggcatctaccagttcttttaatgaaggagctagtgtttttggaggaagagctaacttcaatacggcaataaaaaatatattttcaatatacaatcctgatattgtagcagttcacacaacatgcctttcagaaactctcggcgatgacctagtgagttatattgctgattcagaagttccagaaggaaaaatagtaatccatgcaaatactccaagctatgttggatcacatataactggattttccagtatggttaaggctatggtaacttatctttccgaaaatacaaaaaacaaaaatggaaaagtaaatgttctgccaggctttgtgggccctgcggatatgagagaattaaagaaaatatttaagtgtatgaaggttccatttataatgatgccagatactagtggtgtagtggattcgcctatgactggcgagtataagatgtatcctaagggtggaactacaattgatgaattaagagatgccggtaattcagattatacatttgctttaggaagtttagcgtcagaagcggcagctatagaactagagaagaaatgtaaagtgccttttagcgtgttaaatacacctataggaatagatgctactgatagatttataatggaattgtctaaaataacaggcaagaaagtaccttatgaaatagaagaggaaagaggacaacttgttgatttgatgcttgatagttatcaatattttcatggtaaaaaggttgcaatttcaggggatccggatacagttatagcattaactgaatttgttatttcactgggtatgaatcctaagtatgttataacaggtacaaaaggagaaaaatttgaaaagacaataaataaaatgttggaggataacggaattgaaggttcgaaagtgaagagcttctcagatttatttgaacttcatcaatggataaaaaatgaacctgtagatttagttataggtaattcacatatgaaatttatagctagggcagaagatattccattagttagatttggatttcccgtaatggatagatacggacattcttatattcctaaggttggctacaaaggggcaatgaatctgcttacaagtatgtgtgacgctatacttgaaagaatggacagagacagtgctgaggaagattatgaattagttagataatagtctctttatttaaatatgagggaaatcagctgtttatagatattaaagctgatttctctataattagaggtttcaatttggaggtgagcattcatggagaaaaaggaagagtatttatatgaatcaaaagcgacagctaatatgaagcttaaagatagtttaaatccgcaggaaataattgaggagagaaaaggttttgtatgctataattctcaaaataaatcaggaaccttaagatgtgatgaaaacagtgtttctggtgccgtaagtcaaagagcctgtgtttattgtggagcaagagttgtattaaatcctataacagatgcttttcatcttattcatggtcctataggttgtgctagctatacctgggacttaagaggaagcctatcaagtgaatcggagctttttagaaatagtttttctactgatttaagggaaacagatgttatatttgggggagaaaaaaaactgagggcagctattgatgagatttttatcaaatttcatccaaaattaatttttatatatgcaacctgtattgttggagtaataggtgatgatatagatgcagtatgtcgtgaggcagaaataaaataccctatgatgagagttatagctgttaaatctcctggattttctggaaataaggcaatgggatatagagctgcttgtaatgcaattttgaagcttataggagatagaaaaagcgataagaaggttaaaggagtaaattacttaggagatttcaatttagcgggagaagcttgggttattcagagttatctaaaaaaaattggagtgccagtagttgccaaaataacaggtgatggtaagtatgaagaacttcttaaagcgccagaggcaagtcttaatattgttcaatgtgcaggatctatggagtatttagcaaaaaaaatgcaggagctttatggtataccttatataagaattagttttttaggagtagaggatacagagaactcacttctacaaatagcccatattttaggtggagaagatatagtagaaaaaactgaaaaatttattcaggaagaagaggataaagtcaaagataaaatcgatttttatagaaaaaggctggaaggtaaaaaagctgcaatatacgttggtggggggtataaggctatatctcttataaagcaatttaaaagtttaggaattgaaactgttatggttggaacacaaacaggaaaaccaagggactatgaaataattaaggaaataacaaatagaggaaccgtaatacttgatgatgcaaatccttcagagttagaaagatttatgcttgaaaagggtgcagatatattggttggaggagttaaagaaagacctttggcatataagctaggtgttgcgttttgtgatcataatcatgaaagaaaacacatactgtcaggatttataggcgctcttaactttgcagaagaaatagatttaactgtaaatagtccagtatggaaatatgtttagaagggaaggagtattatggcaaataagaatttagttaatgtggatataaacccatgtaaaatgtgtatgccgatgggtggtgttatggcatttaagggaatagaaaatagtatggtcattttacatggttctcaaggatgtagtacttatatacgaaggcatatggcaactcattataatgaacccgttgacatagcctcttcagcacttacggaacagggaacggtatatggtggtgcagagaatcttaaaaagggtttaaaaaatatgattaagctgtataatccttcaactataggagttatgactacatgtcttgcagaaacaataggagaggatataaacaggattgttggagaattttatgaagaagagagagaaaattcgaaaaatttaaaaattataacagtaccaacacctggttacggaggaacagaggcagaaggctattacgttgcattgaggaagatagttgaacagatttgtgaaaaaacggagaggaacaatagtgtaaatataatatgtgcaaacctaaatcctggtgatgtgagaaatataaaaagtatactaaaacaatttaatataaattatattttgcttcctgatgtatctaatactttagattcacctcataatgagaaatatagaaggattcctgttggtggaactactataaatgatataaagaagatggctggagcagttgctacaattgaaatgggagttactgttgaagatgaaaaatcaccaggggattacttaaggcaaagctttggtgtgccactttataaatgcggtataccaataggaataaggaatacaacaaaatttatttccattctgtctaaattaagtagtaaagatatttctgaagagcttgactatgaaaggggacggtatcttgatgcaatgatagataatcataaatatacggggaaggcaagagcaataatatacggacagccggaactagcattagcactagcaaaagtctgttttgaaaatggagttaatgtaaagttaatagcgctaggtgcaaaaaataaaattttagaagaagctcttaaggaagaaattaaaagtcaaagagaggaggtacttgttttagatgatacggattttgatactatagaaaaatacgcaaaagagtttaatgtgaatttattcataggtaattctgatggaagaagaatggcaagtaggctaggaatagaaataatacgcgtgggttttccaattcacgatagagttggagctcaaaggcaaataataacaggatataatggatctgcatttttaatagatagtatttcaaatgcaatgattaaaataactgagagtaaatttagaaaagatgcatttaacaattattacttagagtcagttgaaaaaatgaaagctgataatatgaaggaagaaaaaacctgcacacatccatgttttggagataatgcgcataagtttgctagaatgcatataccggtggctccaaagtgtaatataagctgtaattattgtagtagaagatatgattgtgttaatgaaagtaggccaggagttacaagtgaagttttagaaccagaagcagctttaagcaaatttaagtttgtaaaaagtaagcttcctaatcttacggttgtaggtatagctggtccaggagacgctttagctaattttgataaggtaaaagaaacctttagattaattcgaaaggaagacacagaaataactttctgtctttcaaccaatggacttatgcttcctttttatgcaaatgaaatagtagatttaggtgtttctcatgtaacagttacaattaatgcagtggataagaaaataggtggaaaaatatatagagaagtaaattatcttggtaagaggtatacaggagaagaaggagcacaaatacttcttacaaatcaacttacaggtataaaatatctatgttctaaaggagtagtgtgcaaagttaatattgttatgttaaaaggaataaatgatgagcatataaaggaggttgtgaaaaaggttaaggaatgtggggtttatatgactaatataatgcagatgatacctgtaaagggaagtgcttttgaagatttacctacggttactaacaaggaattaaataagatgagaaaagagtgtgaaattgatataaagcagatgtatcactgtagacaatgtagagcggatgctatagggactttatcagaagatcgttctattgaatttaggaatataggatgtagttcatgcacaagtacaagttgtagaagtttaagtgagaaagaagataaaacagtatataagtttgctgtttcgtcaagaactggtataaatgtagatgagcattttggacacgccacacaattttacatttatacatatagtgaaggcaaagtgagatttttagagaaaagaaatgctgaaaaatattgcaatggtgaagatgagtgttacgaagacggggaaagaatatctaaaatagtaaaagtagtgtctgattgcagtgcggtacttgctttaagagctggacttgaacccaaaagaaagcttaaggaaaagggaattgaagtaatagaaatgtatgaaaccataaataatggtgtaaaaatggcggcggaaaagttactaaagaataatgttgttgtatcagactaagaaggggagataggtgatgtcaattaaaattaaaaataaagagaaattaataatagataaaaccttacttgaagataagggtagtgagttaaatctaaaaaaagatagagcaggtatggaaaacttcttagctctgcttaataagattggtgttgatttttttgaggttgatagagataacttcaattatatatataatagtaaaaaacttatatatagggtaaaagatcaaaaggatgcagcagttattaatgattataattttggatatattattgtagattttgataaggccaaagattttgataattattttataaatctgatgaatagatcaaagataattttagaagttgatggcaaagagattgatgaaatttttagaactgatagttatgaaatatttaataattttaatgtagcttgtataagaataaataacgttgaaagatgtaatttaaatggatggggagagattataagaagaataaagaatacattttgttcactcgtagatttttgtgcaagtaacaagtattttatggctacagcaattagtatggaagctttaaatgatggagcagattttataacagtggcctttaacggagagaggtatggaatatcttcttttgaggaggtgattctagcacttaaggttatgaagaaggttaaggttacagaaaaacttgatcttttgaatgatctttcaaagatatatgaaaagttatttagaaaagctatatcgccaatgaaaccaataattggggaagatatttttaaatatgaatcaggaattcatgttgatggaatagaaaagaatccattaacttacgaaccgtatgagccaagtataattggagctgatagacaaatgttcataggaaagcattcaggaagaaaggctgtggagattaagctaagggagctaaatattgaaacaatgttgtgtaatatggataagtttttaagtagaataagagaaaaaagtattcaggttcatagaaatatttcagataaggagtttaaagaaatttattataattgtattgaaagcagggattatcatggaagtaaaattagttgatacaactcttcgtgatggagaacaaaaggctggaatagctttgggagttaaggaaaaaactgaaatagctaaattactcgatgatatggggatttttcaaattgaagccggagttgcggctatgggggggcaggaaaagaaaagcattgaagagattgtgaggctaggacttaaaagcaaaatatcatcttttaataggatgaaaattagtgatatacagcattcaattgattgtaaagttgatataattcatatatcagttccagcttctaatatgcaaataaaatacaatttaaaaacgagtaaagagatagtaataagtaatatgaaaaaatgtatttactatgcattaggcaagggatatgaagtaactataggattagaggatgcttcaagagcagatatagaatttttggtagagttatgcaaagaagcttacaaggagggtataagaagagttaggtatgcagatactgttggaatactataccctagaaaaactttttacaatataaataggattatagaggaagtacccgttgaagttgaaattcatactcacaatgattttgggatggcggaagtaaattctttaagtgctgctaaagctggagcgaattatattgatacaaccattgcgggaataggagagagagcaggcaactgtgattttgttaagtttattaatattataggcaaaacaaatcttcgaattgatgatttaaagctgaaggaaaaaatgatcaaaaacataatgaagctcaatattttaaattaaattgtcttaaaaatagtatttatgtggtaattaagaaatactaattaagtagaaataattttacaaggagtaaatatgtgtactatttttaaggtcaatggaaaaattcatatcaaagaactcatatcaagtatagttattgcagaaggtgttggagctttaagcggttttttaagtatgtcaaatgtaaaaaactattctaatttaaagaaaccatttttctcaccaccaggttttatatttcctatagtttgggttattctatattttttgatggcagtggcggcgtatagaatatgggttataggtaaggaagaaagtaaggatgtgaaaaaagctttagtattgtatgcagttcagcttcttttcaattttctttggagcataatattctttaaatttaactgctatggagcagccttcattgaacttttaatcttacttttctttatattatgtgcaacctttcaatttcataagcatgataaagtggctgcatttcttatgataccatatatattgtgggtttcatttgcaggaattttaaattttgctatatggtttttaaatagaaattcttctacataagaagataactaaatatgagattggttcaaggttattataattttggaacaatctctttcttaatatagtgaaatagtattttaagtaattacataaaataagttttaattaataagaacattaaggagttagtagctatagaataatatatttacaaaatattttaaagtgttgaaaaatactgataataaaattataatataaggaaaactattgttcatgtggatgattatagagcggagggatgaagatgaaagcaaaagcggcatttttcgatatagacggtacgttgtacagagagggacttatttcagaagtatttaaaaagcttataaaatacgaaattatagatgaagaaaagtggtataaagaagtaagaccggaatttgaaaagtgggataacagaaaaggtgattatgatgattatctcttaaaaatgacggaaatatacgtagatgcactaaatggacttagcaaatcgcaagtggaatttatagctagtcaagtagtaaaccaaaagggtgaaagagtatatacctataccagagatagaataaagtggcacaaggaaagaggtcataagataataacaatttcaggaagcccaattgaacttgtaaggaatatggctgagaaatatgggtttgatgactatagaggagcggaatatctgctggatgagaatgatgtctacacaggagaagtaatacctatgtgggatagcaaaagcaaagagagagctgtccatgagttggaggctaaatataatatagatctcggtgagagttatgcctatggagatacctctggagatttaacaatgctaaagatggtaggaaatccagtgtgcattaatccaactaaagaacttgtaaaagaaattttaagtgatgaggaagtaaaaaataaaattagaattatagtagaaagaaaagatatgatatataaaatatcctcaagatgtttagagtgtgattgtgagtttgtactataatataagttttaattttactatagcttatacatgtatcgagtgttgatgtatgtataagctatttattaatttaagtggaagatagcatgatttctaaatgaactaaaaaaatgaagcaagtactattatcacttgaagattgtgataatagataaggttggtagagtaatataggaagattgtatgatttctaaatgaactaaaaaatgaagcaagtactattatcacttgaagattgtgataatagaaaaggtttgtaggaaaatataagaagatagcatgatttctaaatgaactaaaaaaatgaagcaagtactattatcacttgaagattgtgataatagaaaaggtttgtaggaaaatataagaagatagcatgatttctaaatgaactacaaaataaagcaagtattattatcacttgaagattgtgataatagtacttgctttattttaagttcattagagaaatcatgtacttgacactttttctttactagtgtattatatacatagtacagtaaaacaatgcgcggttgttactaaatatatggaggttttatgatgttgaattttataaaatatgaaacaaagacagtatatagagagtatttattggttttacttatagcggtattggcaaatgttgcacttatgactagggttggtgcttgggataaattgattgtgtttacgatttctagttgtgcgagtgttggaataattattactaccttaataatgaatatagctatgttttctagagatttgaagaaggatactaagtatcttctttttacacttcctaagagcaggtattcacttttaggatcaaaattaatatgttcgactgttatgatgattttgtcttcattagttggagttgggtttatgttgtattttggaagtaaaataatgcacttcaatgctgccggtttattgaattgggaccttatgaaatattgtgcattggcagttgtttcatatgtttcgtttttagttacagtatatttttgtattttagcagcaagaatgttaagaagaaatggtaagttttcaggattgatatctttagttatatttatagcctatgcttatgtattagttagaattgaaaatgttttagattatatattcccacagaagattgttatgggaaaggttttaagagcggcgtctactgcaaaaaatgttaaggttagtgttgggactactggtggttcaatttatattgtaagttcaatttttgaaattattttaattgtattattgtttatagtatctgtaaaaataattgataaaaaattggatttataaattgaaatatttagagctttaaaatttggaaagaggaagttgtgaatatgaaatttgataataaggcacctatttatatacaaataatggataaaattaaaatagatataataaacggaaccttaaaaccaggtgataaacttccatctgttagggaaatggcagttaaatttaaggtgaatcctaacacccttcaaagggtttatcaggagcttgagagagaaaatataacctatactcaaagaggtacaggaagttttgttagagaggactctgatatgataattaatttgaaaaaggaaatggcaagtgaggttattgaaaactttattgaaaatataaaagaatttggttttggtaataaagatatattaaaaatcgttgaagataagcttaatgaggaggaaaaatagagatggaagaatatttattaaaggtaaataacttaaataaaaagtatttaaataaaaaggcacttgataattttaatttggaacttaaaactggaaaggtattaggactacttgggcctaatggaagcggtaagagtacgtttttaaaaatattatcaggtattcttaaaaagagctcgggggaaattttaatagatggacaagaaccatcaatttatacaagatctatagtatcttatttaccggacatagggtatttatataaatggatgaaaattaaagatgctttagagttttttaaggatttttatgatgattttgattacaaaaaggctatggaacttttggattttatgaaactagacaaggattctaaggttacagccctttctaaaggaatggcggagaagcttcaattaacattagtattatcgagaaaagctaaactttatatattagatgaacctcttggtggagtagacccaacaactagagagaagatactcgacacaataatagataatttttcagaagacagttctatgattataactactcatttggtaagtgatgtggagagattatttgatgatgtagcatttatatcagaaggcaagaatgtattaagcggaaatgctgatgaattaagaaatgaaaaaggaacttcaatagatgggctctatagagaaatttttaaagatttctaaataacattaaatctgcataatataaaatgcagatttttttaaacaaatattgataaagattatcaaatgatatataatattgttagttaataaattaacaaagttttatattttaaatacaatgttgcataagacaaggtaattgaactaatactatactagtaattggaggggataatatatgaaaaagaatactaaaatttcagtaatcggagcaggatttgttggttcttctacagtatttgcgctaatgaacggtggacttgcatctgagatagttatagtagatgtaaataaagataaggcagaaggggaagcaatggacttatctcatggtgcagcttttgttaaacctgtagttgtgaaatctggagattataaagatacagaaggttcagacatagttataataacagcgggagcagcacagaaaccaggtgagacaagacttgaattgataaataagaactacaatatatttaagtctatagttcctgaagttgtaaaatataatccaaacgcaattttattagtagtttctaatccagtagacatattaacttatattacctataaactttcaggttttccaaagtctagagtaataggttcgggtacagttcttgatacatcaagatttagatacatgttaagtgaacattttgaaattgatgttagaaatatacacacttacattatgggagaacacggagattcagaaatagctacatggagtttaacaaatatagcagggatggatgtaaatgaatattgtgaagcttcctgcaaaaaatgtgatggatcattaaaatataaaatatatgacgatgtaaaaaatgcggcgtatcatgttatagagaaaaagggtgcaacttattacgctgttgcactagctgtaaaaagaatagtagaagctatattaagagatgaaaattcaattttgacagtatcttctcttcttgaaggtcaatatggaataaaagacgtgtatatgggggttccttctatagttggaattaacggagtgaaggatattatagaggttcctttaaatgatgaagagaaaaataatcttacagattccgcaaaaacattaaaggaatcactagatagtatattttaaggtaaaagacctaaactccaagggtggaggctaggtctttttttattttattgttgaaatttaattagctttgttatattatatatataacaaagaaattgggggtgttattgtgattgaattgcttaatgtgaataagagctataatgggaagaataaggctgttgataatttaaactttacgataaattcaggtgagatttttggatttttagggccaaatggtgctggaaaaagcactacaataaagatgataacaggtattataaaagctgattctggagaaataaaagtcgatggattgaatattaaagaaaatccaattgaggctaaaagaaaaatagggtatgttccagatagtccagatatgtttttaagattaaaaggtattgaatatttaaattttatggcagatatatatgacgtaacaacatcagatagaaaagaaagaattgaaagtttaagtaagtattttgatatggaaagtgctttagatgataaaattcaaagttactctcatggtatgagacaaaagattgttgttatgggggcacttatacatgatccagatgtttggatactagatgaacctatgactggcttagatccaaaggcttcttataatttaaaagaaatgatgagaaaacatgctgatagcggaaaaacagtgtttttttcaactcatgtgcttgaagttgctgaaaaactttgtgatagaattggaatagttagtaaaggaaaaatcgtattttgtgggacaatgaatgaaatgaaacaaaagcttcaagaggaaggaagttctcttgaaagaatgtttttggagttggttgaagatggagaaaaataaatttttaattttaactaagtatcttctccttggtggttcttatggaagcggaagaaagaaaaaaggtatattttcgaaaagtaccgttgcaaatctagtattaaagtttattttaatccttatttttggtgcgattgcaggttcaattgatcttgctgcatatatgggcttaaagatcgttcatatggagtatgtgctgcttcaaatgaattactctgctataactgcaattattttcttctttggaatattctccacaatgggagtgttttatttttcaaatgacataaattttcttataccaatgcccttgaaaccggagacaattgttgcaagtaagtttacagtatcacttatacaagagtattttattacagttgtaattttactcccatgtacattggtatatggtatagcatcgggaatgggagttatattttatatactaagcattctattcatgctatttgaacctatacttccattagcagctgcccttttgataagtatatttattatgccacttataaacaagtcaaagaaaaaggatttatttaaaaccctaggaggaattttagcagtaggttttggattgggtataaatatattaacaagaatgatgggtggatcaagtagcgcggagcttgttaaaaacgtaaaaagggttaactctactatgttaaatgttttcccacttggaagtatagcaagtaaagcattagtaaattcaaatcttttgtatacagcattatttattttgataaatgcatgtagttttgtagctataatatacttagctaagaatttgtattttaaaggtgttcagggactttctgaatcttcttctaagagaaagaaaatagattctaagaagatgaataaagaaactcagaaaaagtcaattttattttcttatactatgaaggaacttaagattttatttagaactccagcgtattttgtaaactgcgtgatgtcaagtttcatatttcctgttgttatattaattccaatgttatttaatacatcagataagaaggggctaagctcagctttaagttatataaatggccctcaaggatttaggattttagtaacagcctctgtagtatttggacttattatgggtacaatgaattcagttacgtctacatccatttcaagagaaggcagtaacttttttgtaatgaagtatataccaattaaatactcaaaacaaattgcagctaaaatattttcaggaatatttgttggagcaatatcgataatacttatagatatagcagcgttttttgtagtgaaaattccagtatatgtttttgcatacatgattataacaggaatacttgggattgtttttacatcaattataggtatgtatatagatttgagtatgcctaaattagaatgggatacagagcaaaaggcggttaaatcaaatataaattcatttataaattttcttgtgtcaatattacctgctgcaataattatagtaatatgtatatttataaatgtgaatgttaatatattctttggaatattgtctctagtgcttttagctttagactatgttacatacaaggtagtatgtatcagtggagaaaagaaattagatagatatgagagttagctattgaggattacttatatgtataccgcggttttataatcgcggcatatgtataagtttttattttaatactaagttttccttaaagacatataaattaaagcccattgattgtgctagtttttttgcacgctcatccttgtctagaaaattatattgaagtattttaccctccttaagacaaaactgacataattcagctataagtgttttagaaataatagtgttatctctaaatgaaggatgtgttattatattcaaattagcaatatcatttttaaaataatctaaggaagcaacagacacaaggctgtctttatagaaacatcccaaaagtattggataattttctataattaaggttgttttatgttctatttctgaatgagattttttaaagttctcgagtactttcgtatcagaaggtaagagctttcgtacagaatattcgctatttaaaacatcagaaacatagctaggttcagtaaggtaacaaaaataagcgttttcataccttcttatattatttttaaaataatcctcgaaatctttagagtatagagttttatacggggagtgactatttacgaaatcgcttattttactcaaaatgcatggatctatttttataaaggacttatcatttatatgatatattgatatttttccagagtttttaagtgagttatctggaatggtttgcgattcagtatctttatcgctaggtttgtaatcaaatatattttgccaatataaatttattttttttatctggttatcgggtataatactaatcattattaccaccaccttatacttaaatatgatatcataattgggtaaatattacaattaggctttaatagacgccattagttgaatacaacatttaaattattatatccaaaagacgcaagcataatgtaaaaataatgttaataaaatgtgaaaagagctgtttatataatatatttattaaatgcttacaaaggtaattgtgatataatgttatgtactaaattactcatatagaatatgaagggaaagaattattatgaataaagctattacaagaattaaagtaagatatgctgagactgataaaatgggaatagtgtatcatgcaaattactatgtctattttgaagctgcaagagaggatttaatagaaggagcagggataaagtatagtgatatggaagacataggaataatgatgcctcttgttgaaacaaagtgtaaatatcatgagggagcaaaatatggggattacatattagtagagacaaccttagggaagcttagtccaataaaagtagaaattaattacagagttttaagagaatctgatgggaaacttttagcagaaggacagacaacacaagtatttgttgatgctcaaaattttaaaataataaagctaatgaaaagttatcctgaagtgtgggagaaacttcagaaaattaaatagtaaaaaaaacctctaatgttaataagaaatttttatttgtggattgatattatctgtaaatatattataataaatcttatgtatacataaaattactttaagaatatcaattagtataacaatactaaggaggattaagaaattggttaataagttttttgacctgctcatatgtagacctttagcaaatgagcaaagttcaagcgaaaaatataatgttccttttggccttgcggtaatggcaagtgacgccatttcttctgttgcgtatgcatcacaagaaattctattagtgcttgtgcctataataggagctgcgtcttacgcatggttaggcaaggcttctttaatgattataggactactccttatactcacagtttcatacgtgcaaattataaaggcatatccacagggtggtggagcttatatagttgctaaggaaaatttgggagtaaaacccggacttgttgcaggagcttcacttttattagactatattttaactgttgcggttagtgctagttcaggagtcgcagctataacatctgcgttcccaagtctagtaccacacagcgtattactagctgtggtacttattattattttaacgattctcaatttacgaggagtaagtgaatcggccaaaatgtttagtatacctacatatttgtttatttttagtatgatatttatgattatttttggaatcgcaaaatatattatatatggtgcacctagcatgcatatgatacatcagactcttaagccaatgggagatgtaagtatatttttaattctgaaggcgttttcttcaggttgttctgcattaacaggacttgaagctgtaagtaactctgtacctaattttaaggaaccaggtcaaaagaatgctacaatagtaatggttcttcttactttatgtatatttgttatatttggtggctcttcacttttagcaagattttatggtgctatacctaatgataatgtgactgttttagcacaaatagcttatggtgttttctcaggtaaaacatttatgttctatgtagtgcaatttaccacagctatcatacttataatggcatgtaatacttcatttacaggatttcctatgcttatgtctgtaatagcaagagatggatatgctcctagaagctttgctacaagaggtaaaagattaagcttctctaatggaatagtatttctttctataatagcaggtatattagtcattatatttaaggcagatacgcatcttttaataccactttattctgtaggcgtttttttatcctttacattagcccaaacaggaatggttattcactggaataagacaaatgaaaaaggtaaaaatacaagaaagcttataaacggttttggagcagcaattacactcttaacaacaggtgtaattgtttatgagaagttcctatcaggagcgtgggtcattataatacttgttcctataatagtacttggatttcttcatattaaaaagcattataactatgttgctagaggcttgagggctgatgaggaatatgttaagaactgtggaattggacaaacttataaccacctaataatagttccaatagcaagtttaaataaagctaccttaggtgctttaaaatatgcaagaagtttaacgagtgatgtaatagcacttaacgtatcacctaataaagagtatatggataaacttaaacataagtgggaggagcttaatacagatattttacttgtttcaaagtattcaccttatagagctatagttacaccacttatagagtatataggagtaatatcaaaagcagcagtaccagatgaaaaaataacagtggttttacctcaatttataacaagagataaatcaggacaaatacttcacaatcatactagctttttattgagagaggcacttttaagatatgacaatatagtggtttcaacttatccattccacttaagtccaaaggatgataacgaagaataaaatatacaaaaaaaagcggatttaattctaaattgttaatcatacaataacaaaacgattgatttaacaataatctgcactatatgtttacttttttaataaaatgtagtactatatagacaattaaattagatatattgctatgaacagaaatattaagaatcaaataaacttccagagagtcgggattgctgggaaccgatagtttttagattttgaactcatctgtgagcagtcgcctgaagttactgtagggtagaacggaattccaccgttatatggatagatagtacgaaccatttatagtggagtgctattgaaaaagtgaactttaagttaagttaaatagagtggtaccgcgagtaaacctcgtctctttcgtattgatggagacgaggttttttatttattaagaaaataaacatttaaaggagtgttttttatatgttgtataataaatatgtcaaatatcctaaagtaaaattggacaatcgtgaatggcctgataagcaaatagaaaaggcacctatatggtgcagtgttgatttaagagatggaaatcaagcattaccaaaacctatgaatgtagatgaaaaaataaagatgtttaaaatgcttgtagatataggttttaaggagatagagattggatttccttctgcttcagaaacagaatacgaattcacaagaaagcttatagaagataaattaatccctgaagatgttactatacaagttttaacacaagctagagaacatttagttaaaaaaacatttgaggcattaaagggagttaaaacagctattgtccatgtgtataattcaacatctgagcttcaaagaagagttgtgttcaaaaaagataaggatgaagttaaaagtcttgccataaaaggtgcacaaatggtaaaaaaatatagcgaatatactgaatatagtgaaagtaaatttgtttttgaatattcgcccgaaagctttactggaaccgaacttgattatgctcttgaggtgtgtgaagctgtacttaatgtgtggaaacccagtaaagagaataaagctattataaatttaccttcaactgtagaaatggcaacccctaatatatatgcagatcaaattgaatggttttgtaaaaaattattaaatagggagtccgtgatacttagcctgcatacgcataacgataggggaacttgtactgcttccagtgaacttgggattcttgcaggagcggatagagtggaaggaacactttttggaaatggagaaaggactggcaacctcgatataatgaatatggcattgaatatgtattcacaaggtgtagatcctgaacttgaattttctaatttaaatgatatagttgaagcctatgaagaatgtactaagatggttgtgcatgaacgccacccatatgcaggtaagcttgtgtttacggctttctcaggttcccatcaagatgctatacgtaagggattaaagtcattaaaggaaggtaaaaacaaacattgggaggttccatatcttgcagtagatccccacgatttgggaagagaatacgaagaaattatacgtataaatagtcaatcaggaaaaggtgggacagcgtatataatggaaagtgattttggctttatacttccaaaggcaatgcaccctgagtttggaaaggtaataaagaaaaaatctgatgagcttgattgtgagctttcaccagagcaaattttcaagttttttaaggaagagtatttagaaaacagaagcccatactacttgaaaaattacaagatacattcaatacaaaatatagaggaagagaaaaatactgtagatatcgaagctgtaatatcggtaaatggtaaggatacaagtatagaaggggtaggaaatggacctgtggatgctttctttaatgcaatgaataataaaaagtataatggttgtaaatttatatcatatgatgagcatgcgttaaatattgggtctcattcaaaagctgttgcatatgttcaaattgaaagtcaagataagaaatattttggagtcggaatatccgataatatagatacggcatctattaatgccattgtaagtgctttgaatagaagtaaattaaaataatattgtattatattaaaaagtgatagccataaatggttattgcttttttagtaaaagatgcttttacaagtacatctgtttcttaaccaaggagttacaattaatcataaaaattcgcaatttactgtaatatgaataaatatatgtatagttaatacaaatttgagggaatttgtgaaaagcataagggcgtttatagcatttcaaaaggataaaatgattttatatctagatattaattcatattgtagctattgtaccaaatttgattagtagtttgtacaaattacatatggaaaagaaattgataacatgataatataatggtatgaaaaatttaaaacaggtaaaataaacctatccattttttattattattaaaaaagttacgtttgtatggaaataaatgttagatacgactgaactgcattaataatttaattttctattttggtgggtagaattctataagtgagtatgtgttttctatataactaaggaggtattatttattatggattttaggattgagagtgattccataggtgataagaaggttcctaaggaggtatactatggagttcaaacattgagaggtgcggataattttaaaataacaggacttaggttaaatgaagagtttataaagagtgttgttcaaataaaaaaagcagctgcaattactaatttagaaattggagagctagaggttaacataggaaaagccataattaaagcctgtgatgaggtgatagctgggaagtttaatgaagactttataatagaccctattcaaggtggagcaggaacatctataaatatgaatgccaatgaggttattgcaaatagagctatagaaattttaggatatgaaaaaggaaattatagaattgtacatccaaacgatcatgtcaatatgggacaatcaactaatgatgttataccaacagcaggaaagataactgcattaagacttgtgatcaagaatttagacaaactcaaagaattaagcaatgcctttagtgagaaagcagaacaattcaaagatgtaattaaaatgggtagaacacagcttcaagatgctgtacctataacgttgggacaagaatttagtgcttacagtgcggttgtaaaaagagatatcgctaggattcaaaaagctcaagatgagctgaaagttgtaaatataggtggaactgcggttgggacaggtattaatgcagatagcagatatgtggatagaatagttccaaggctttcttttgtttctggattaaatttaaaaaaagctgacgatttaatcgatggtacacagaatttggatagctttgctagtttatccgcaacaataaaaacctgtgctttaaatctatctaaaatagccaatgacttaaggcttatgtcttctggaccaaggacggggttaggggagatcaatcttcctgcaaagcaaaatggatcatcaataatgcctggaaaagttaatcctgtaatacctgaagttataaatcaaatagcctttaatattgcaggaaatgatgtagctatttctatggctgttgaggcagggcagctagaactaaatgcttttgagccagttatattttataatatatttgaatctatccaaactttaacaaatggtgtagatacatttattaaaaattgtattctagatattactgcaaatgaagagatatgtagtgaatacgtaaataatagtgttggaatagttacagcactctgtccttatataggttatgcagaatcagcaaagatagcgaagatggctataaaaagtggagagtcaataaaaaaagtagttttaagagaaggcgttctcaaggaaaaggaacttaatagtattattaatccactaaaaatgactaaaccagggattgtaggaaaatagtagataaaaacttaagataagcatataattaatagtgtcggttttgtcggcactattaattatatgtaaatgcgggtttaatatatgatatataacaaatactagttttaatatcgatattaaagtgcatgacagtttgaggtgataacaaaatgggatacagtattatagatataattgataaggcgataggtattgttatcagaaggaaaagcgaatatgaaaagatagaagaagaaaaacacgatagtcaggctataagagtaatgtcggctgttttggtaaaggaagcagatagaacaattcagtattataaaacattaaaagaagaagtgggcagcgttgaatttgaagagattgactttattgtgtatgataaaatgtcatttttaatagatcaatttaacaaaaaaacttatgaacaccatattaataatgttaaggactatttgaagttttctcttgatttagaaaaggatgtgtattctctgcttgttgatgtacaaggaaggtttgtgaaaaataccagtgatacacatacaaaaacctatgaaatattatctgacattatagataataaggctaatcacatttcaacaattgaaaaaacactaaaataaagaatcatatgtttgttttaagcacatgattctttattttcttaatagataacttttagatttagtataacattggtgactatctatattgataatattaatgataacttataaaaatgaaaagatatttatatataaaactattgacattcttaataaatatggtatgatagtattcgttgtctcaagtttgtcgcttttaaaaataaaaaaaagttttttaaaagatgttgacaaagcttgttgaaaatgataatatgtataagctgtctagtgcagcgaacaattgaactttgaaaattaaacagagaattaaagaaccagcaattcttttgaatagaattatattctatttaaataaatttagcgatgagctaaaggaatacagattagcatctgtataaaggattcagaggaacctcatattgataatgatgagggggttttgggtaagacgaagaaatgaagagaactaatagtaatctatagtgaactttattgatgaagtattacacaaaattgaccatcatagtctatagagatttggatgtatctaatcaaacttttaaattgagagtttgatcctggctcaggacgaacgctggcggcgtgcttaacacatgcaagtcgagcggggaacttcggttcccagcggcggacgggtgagtaacacgtgggtaacctacctcatagtggggaatagcctttcgaaaggaagattaataccgcataatactcgagaatcgcatgattcttgagccaaaggatttattcgctatgagatggacccgcggcgcattagcttgttggtgaggtaacggctcaccaaggcttcgatgcgtagccgacctgagagggtgatcggccacattggaactgagacacggtccagactcctacgggaggcagcagtggggaatattgcacaatgggggaaaccctgatgcagcaacgccgcgtgagtgatgaaggtcttcggatcgtaaaactctgtcttatgggacgataatgacggtaccataggaggaagccacggctaactacgtgccagcagccgcggtaatacgtaggtggcaagcgttgtccggatttactgggcgtaaaggatgtgtaggcggatatttaagtgagatgtgaaatccccgggcttaacttgggggctgcatttcaaactggatgtctggagtgcaggagaggaaggcagaattcctagtgtagcggtgaaatgcgtagagattaggaagaataccagtggcgaaggcggccttctggactgtaactgacgctgaggcatgaaagcgtggggagcaaacaggattagataccctggtagtccacgccgtaaacgatgaatactaggtgtaggaggtatcgactccttctgtgccgcagttaacacaataagtattccgcctgggaagtacggtcgcaagattaaaactcaaaggaattgacggggacccgcacaagcagcggagcatgtggtttaattcgaagcaacgcgaagaaccttacctagacttgacatctcctgaattagtccgtaatggatgaagtcccttcggggacaggatgacaggtggtgcatggttgtcgtcagctcgtgtcgtgagatgttgggttaagtcccgcaacgagcgcaacccttatcattagttgctaacatttagttgagcactctagtgagactgcccgggttaaccgggaggaaggtggggatgacgtcaaatcatcatgccccttatgtctagggctacacacgtgctacaatggtggggacaaaaagatgcaataccgcaaggtggagcaaaactcaaaaccccatcccagttcggattgtaggctgaaactcgcctacatgaagccggagttgctagtaatcgcgaatcagaatgtcgcggtgaatacgttcccgggtcttgtacacaccgcccgtcacaccatgagagtcggcaacacccgaagcccgtgaggtaaccttttggaaccagcggtcgaaggtggggttgataattggggtgaagtcgtaacaaggtagccgtaggagaacctgcggctggatcacctcctttctaaggagtcgacatggaaatgtaatttccatgaaggttctttgttctctgtttaattttgagagtttaattctctctaaatttgtactttgaaaattgcatagtaatcaatatagagtaatactctaaagcaaggcaaagttaattctttgttgtttgaatttaaatatatttacttaaggtcaagctacaaagggcgcatggtgaatgccttggcactaggagccgatgaaggacgtgataagctgcgataagcttcgggtaggcgcaaatagcctgtgaaccgaagatttccgaatgaggaaactctcatgggtaaccccatgaactgtatactgaattcataggtatatagaggtaaacccggggaactgaaacatctaagtacctggaggaagagaaagaaaaatcgatttccttagtagcggcgagcgaaacggaaagagcccaaaccggaaacttgtttccggggttgcggtcagatcattaaggctttatatcttaaccgaagatttctggaaagttaaaccatagaaggtaatagtcctgtaggtaaaaagagaaaaaagcccgatctgtaccagagtaccacgagacacgtgaaaccttgtgggaagctgggaggaccacctcccaaggctaaatactacctagtgaccgatagtgaagaagtaccgtgagggaaaggtgaaaagaaccccaggaggggagtgaaatagaacctgaaaccgtgtgtccacaaccgatcaaaacacgttaatgtgtgatgatgtgctttttgtagaacgagccagcgagttacggtatgcagcaaggttaagcacttaaggtgcgcagccgaagggaaaccaagtctgaatagggcgtatagttgcatgctgtagacccgaaaccgggtgacctatccatggccagggtgaagcggaagtaaaattccgtggaggcccgaaccacaatggtgttgaaaaaccatgggatgagctgtggataggggagaaattccaatcgaactcggatatagctggttctcctcgaaatagctttagggctagcgccatgaatgagtaccggaggtagagcactgaatgaggtaggggctgacaacagttaccgaactttatcaaactccgaatgctggatacttgaatcatggtagtcagactgcgaatgataagatccgtagtcaaaagggaaacagcccagatcaccagctaaggtcccaaagtatagattaagtggtaaaggatgtgggatttctaagacaactaggatgttggctcagaagcagccatacattaaaagagtgcgtaatagctcactagtcaagagatcctgcgccgaaaatgtccggggctaaaatctaacaccgaagctgtgaacttgtacttcgtacaagtggtagaggagcatcctgtatgggctgaagtcgtaccgaaaggagcggtggactgtacaggagagagtatgctggcataagtagcgagaactaagtgagaatcttagtggtcgaaaacctaaggtttcctggggaaggttcgtccgcccagggtaagtcgggacctaagccgaggccgaaaggcgtaggtgatggacaatcggttgatattccgataccgcagagtaacgttatgagaaatgggatgacgcaggaggataggatatgcgtacgttattggaagtacgtctaagcactgaggatgaaagataggaaaatccgtctttcgttaagtctggggtgtaatggtgaggtagtttactaccgaaatatctgatttcatgctgccaagaaaagtctctatccaggagctctgtgcccgtaccgcaaaccgacacaggtaggtgaggagagaatcctaagaccatcggaagaattgctgttaaggaactcggcaaattgaccccgtaacttcgggagaaggggtgcctacgagagtaggtcgcagagaataggcccaagcaactgtttatcaaaaacacaggtttctgctaaagcgaaagctgaagtataggagctgacgcctgcccggtgctggaaggttaaggggaatgcttagcgcaagcgaaggcatgaacttaagccccagtaaacggcggccgtaactataacggtcctaaggtagcgaaattccttgtcgggtaagttccgacccgcacgaatggcgtaatgatttgggcactgtctcaacagcaaatccggcgaaattgtagtgcaagtgaagatgcttgctacccgcgattggacggaaagaccccgtagagctttactgtatcttagcattgaatctcggtattgtctgtacagaataggtgggagacttggaagcagttccgtcagggattgtggagtcgtctttgggataccaccctgacagtactggggttctaaccggaggccatgaaactggtcacgggacatagctaggagggcagtttgactggggcggtcgcctcctaaaaagtaacggaggcgcccaaaggttccctcagcgcggttggaaaccgcgcgtagagtgcaaaggcagaagggagcctgactgcgacacaaacaagtggagcagagacgaaagtcgggcttagtgatccggtgacacctcgtgggagggtcatcgctcaacggataaaagctacctcggggataacaggctgatctcccccaagagtccacatcgacggggaggtttggcacctcgatgtcggctcgtcgcatcctggggctgaagtaggtcccaagggttgggctgttcgcccattaaagcggcacgcgagctgggttcagaacgtcgtgagacagttcggtccctatccgtcgcgggcgaaggaaatttgagaggagctgtccttagtacgagaggaccgggatggactgacctctggtgtaccagttgtcttaccaaaggcacggctgggtagctatgtcgggaagggataaacgctgaaggcatctaagcgtgaagcccacctcaagattagatttcccataacataagttagtaagacccctgtaagaacaacaggtgataggtcagaggtgtaagaatggtaacattttaagctgactgatactaataggtcgagggcttgaccaatataaaggtaaatatattaagattactatgcaattttgaaagtacaaatgctttcaaaaactaaataaattaatccggtgaccatagcttggttgtaacacccgttcccataccgaacacgaaggttaagaaccaaagcgccgatggtactgcaggggcagccctgtgggagagtaggtcattgccgggtaacttggtttattagctcagttggtagagcacatgacttttaatcatggtgtccggggttcgactccccgataagccactatataattagaacacttgctaaagcaagtgttctttttttaacataagtttataattagttatagttagttgttaagtttagttgcgtttttagcaacaatcttcatcaaagtgatcatgttcgcaatcacaatcgcatacaggatctacagtacagatgcagcatatttttatatatatgcatttgtcatgatgtttttttactaaaactacatctctgcatacttttttaatttttacgtgtttcaattctttgcagccacattgctgtaaagttatatttactcttcttcttttatatcttcttaggactcttctcatgttattcatgtgtttacatttgctcatcactatcgcctcctagtaacataatatgtgttttaaagcagagtgacacaaaaatttaaatataaaattattaactttactatagtgattataacgagttataatataagtacatataaaaactatgaggtgtgttgagatatgaggttgaagcaaattgaaaatgtaaaagagggaagtattttaggcaaaacactatatgatggtgagggaagagtacttttgacaagaggaagtgttttaacccaagctataatagataagataaaaagtattaatatatatactatatatatagaggatgaatatagtgaggctataattgaagatgttataaaacctgagataagaagaactgcaataaagatggtaagaaatacattttatagactcaataagtataataataaagaaaactatacagggagaaatctttataaggaaagtgaacaagattttaaatcaatatattacatagcaacggaaataattgaggaaattttatctcaaaagaatgttatgataggattagtagatataaaaagttttgatgattatacttatcagcattctgtaaatgtagctgtaatttcgcttattataggaattaaacttaagtttcacaaatacgaattatttgatttgtgtataggagcacttctacatgatgtgggtaaaatgtttattccaagtgagattttaaataaaaaaggcgaattaactgaggaagaatttaaaataatgaaagaacatactgtgagaggatatgattatcttaaaggtctctatgagatatctgtacctgcaaggataatttctcttcagcaccatgaaagagcaggaggtcaaggttatccagaaggaagatcaggagagagaattagtatcctttcaaggattgtagctgtagctgatgtatatgatgcaatgacatctgatagggtttatagaagagcaattgcgccaaatgaagcactagagtatattatggctaacagtggaagtaaattcgattataaagtagtacaggcattttctaagtctgttattccttatcctgaagggtcaattgtaagactaagtaataatgaaataggtgtagtaacaaaaatacatgaagattttcctttaagaccagaaataaagataatttatagtgaagatgatagcagagtagatgaagttataaatttacttgaacaaaattctttggttataatggctattgaagaaaatgtaccagagaaaaatagaagttagattaattatttgtatatggtgaaaactgccttggttataacaacttaaggcagttttttatacttataaggtaaaaatgtatctaattaaatgcattgtatatggatttaacagctttttcaaagtcaactgtttctactccaactattacatttatttcgcttgaaccttgatcaatcattcttatatttacattttcttttgaaagagcagtaaatattttattagctatcccctttgttttagccattccagttcctaccgtagctactaaggccatattaggatgaatttctattgaatctggattgcactgctttttgatttcttctattattttatcgcatttaccatctaacttgcaatcttctattacaagtgaaactgagtcaacgccagaaggcatatgttcaaaggatactccgtacatttcaagtattgaaagtatttttctacaaaagcctacttcactattcaaaagagctttttctattgctattacagtaaagttctttttaccggcaatacctgttatcgtacctaaattaatttctttatgtgtatcacttaatatgagtgttccaggatcagaaggcttgtttgtattctttatatttattggaatacctgaatctttcacaggaaaaattgcttcctcgtgaagcacagtagcacccatataggataattctctaagttctttgtaagatattttagatatggtttttggattttctactattctaggatcagccattaaaaaaccagagacatcagtccaattttcatataaatcggcatttacacctgcagaaattatagaacctgtaacatcggagccacctcttgaaaaagttttaacatcgccattaaaagaggaaccgtaaaatccaggtataacagctttattacaggatagaactttttcttttattttttcatagctcttcttctcatcaaagcaaccggatttatcgaagaatattacttctgctgcatcaatgaattcggcattcaaatatttagccagaatcactccattaagatactctcctctactagcagcataatcacttgaagccccattttcaatattttttttaaccttttcaagataatatgctatatccatatctatgttaagttcgctcactatttctgtatacctttgtgaaattagtttaaatacgtcatcaaaaggtataccatttttaacatgagcattacataaataaagtaaatctgttatcttgtagtctttgttagttctctttcctggagcagaaggaattatgtatttacgatttgcatctgaatctattattccttttactttcttaaattgattagaatcggcaagagaactgcccccaaactttgttactacgattttcatgttaaccacccttattatttattattaaagattttagtaaatcatttttattatatactatattacataatgagttcaacattatgtacatgttaaagaaactatgttataagcgtaaaaaaaatgctgtacgtttttacttatgaaatgatgaaattgacggaataacattaataaagtaaaaaatgtaagtaaaattatttaatatacattattatgtggataaaagttacttttagtgttattattaagattataatagataatttttttgattaaaggagatttcaaatggaaaataaggttttagccgttgttaatggccaagaaataacagaaagtgatttaaatgccactataaatagtttcccagaggaaagaagaagacaatttttaaatccagaaggcagaaaacgacttcttgacgaaatagtttcttttgaacttgtttataatgatgcaaaagattcaggaatagaagaacaagaagtagtaaaagctcaaatagagaatgcaagaaaacagattttgacacatgcttctcttgacaaaatttttagtgatattgtagtagctgattcagaagtagaaaagtattatgaggctaacaaagaaatgtttaaagatcctgaaaaggttgcagctaaacatatattggtgcagacagaagaagacgctttaaagataagagaagaaataaaagaaggtaaaacatttgaagaggccgctgctgagtattcaagttgtccatcaaaagaaagaggcggagatttaggtgcatttacaagaggtcaaatggtacctgagtttgaagaggcagctttttcacaagagataggagaagtgggagcacctgtaaaaacacagtttggataccacttaattaaagttgaaggaaagattgaaccggctcaaagagattttccaagtgttaaagatgcaattaaaaatagattacttcaagaaagacaaagtatgaaatatagttggtatattgatcaattaaagaacaaatacaaggttgaaataaaataaaaaaataaggataccagagactttggattatatcgaagactctggtatttgtattatatagtaaactaatcattgttagaacaccaggttttaattaaaagtagtattataaaggaaattatataaagcaccagagaaaaagcagcagctttaactatgtttgtttgcattaaagtgtagatgaaaagaggcatagttgttgttttgccaagtacgtttccagcaaatacaattgttgcaccaaactcgcccatagatctaatccaagttaaaattaatcctgatattattgatttttttaacataggaataataactctaatggctgttcctactttgccacagcctgatacatatgaagcttcaaaaatttcaattgggactgctgaaagagaagtttccaaaacctgtatatagtatatagaagaaacaaaaaattgagctattataactgctatgggagtaaaagtaagttgtatattgtaaatagaaaacaaattttttagtaagccatttttaccaaatgcgagaaggagtgcaattccagcagcagctggcggaagagtgatagggatttctataattaaatcaactaactttgctaaaaggtgtttcttattaagaactatgaaaaatacagttggagtaccaagaataaaagtaagaagcagtgatgtcaaagaagtttgaaaactcagctttattgcggataaactttcgtgattttgaagtgtggatattatgttagatattccagaatattttacgacagaaacaatagggaaacataaaataactaaatatattattacgaatattgaaaaaaagcatataaagaatttgtctaaatcaaagtgattcttttttataatcatttaattatatcctttttattctaaggcattgaaaatccatatttttttaaaatctttttacccttattagacataacatagtctataaagcttttagcggagtttttatctttagaagaatttacaactgcaattggataatttgctgtaacactttcaaactcttttaagtttattgtatttaattttgatatgttttgttcagttatatctgttttgtacacaacaccagcatctgattcaccgagaagaaccttacttacaacgtcttttacgttaagttcattgcttttaacattttttagtattttgtttttatcttctgaacttattgaattgttggctatagaattatcaagggatttataaaagtattgaccgacaggaacagatttatctgcaattactaaagataaattgttaatacctaaatcagataatttggatatcttctttttactatctttattttggcaaaccacaattttgtttttaacaaaaatagagggggatgaaacaagttttgacttccttacatcgtccatattttttgtgctggcagatgcaaatacatcagctgttgcaccttgattgataagagtttctagttgctgactacctgcatagtcaaaggaaacatcaattcccgtgtcttttttgaagtcttttgcaatttcattaaagctttcagtaagactagctgcggctaaaacagttatccttttattacttttttttgtagaagccactgatgttttttttattgtagatgagtgtgaattaatggctgtgcatcccgaaaggcaagaaactagaaatgcactaattgaaagaaaggtaataatttttttcatattcatagggtatccctcctaattgaatttataaaaagtgttagaacttgggtccaaaaatttcattaccgcatacatatctcttcattatatttctgtcatctccaaggtatataaatctttctagtctttcggtaagatcatagtcttcaggatataaatttgaatcatttattactagggcatcaaagtcgtatccttcttcaaaacttcctacttttccaaaaaaactaccaccttttttggtagccatgtaaaaagcctcagaggtggataagaacatatcctttttgccagattcttgccactttattttggaattttgtattgcataagcaataaccttaaatagagaacaagtatgtccagcgcttatatctgaacctagaacaacattaatacctaaatttaaatattttcttacaggcatcattccactaccaagattgaaattagacgttggacaatgcacaatggtaacattatttcttttaattaaattaatttcttctttggatgaatgaatacaatgagccattagtgtaggtgtatttccaaataagccgaacttatcatatacttcaccataaaaattgcttttcttatgtaaagatttgactacagctatttcgtctaaattctctgaaagatgagattgaacgggaagtctatatttataagaaagtttgcctaaaccatccatgagttcatttgagcagcttggtacaaatcttggggttattattggttttactatatttgatttatctttgtattttaaaattatctcctctgtatcatttagagaagtaatatagttttctgtcaagtaatcaggacaattgtaatccatatttactttaccaacataggcaccaattccagattttataagcatgttaaaaagctcaattgtagaatctttgtgcaatgtagcaaaaagtgcaactctagtagtgccgttttttattaagtcttttattaatcttccataagtttttttagcataatctacatttagaaattttgcttcttctggaaaggtataattatttagccatggaagaagttccttatccataccaatacctagatttttatattgagaagcatgggcatgaagatcattcattccaggtataataatattatttctgaaatctattattggattgcctttgtatttatctggaagattgctagaaacggaagctatttttccgtctattacaactatataagagtctttcattatagtaaatttatctgatgtttttgtgaatattaaatttcctttgaagatttttaaattaatgtctttttccaataggaacagctccttacaagaatgatgtgaatacaatcatatactttattttaagtgtacggaacataactatacgtaacaagttgttattcaaagttatgttttattaatttatataatatcacaatatttggaataaccaaaatattaaattattaataaaacgagtaaaaaataataaaaatagctaaaaaatagatataaattgataattcgttaaaaaactcgcgttttgattgattaaacataaggacagaacatactgggaaattaaaaatgaagtctagaatattttatagcaccatggataatcagtgagattttattcataagtatatattgtttgaggaataagtattaggtttgggggtgatgtgatggattcaataaagttttctattctaacgttagactataaattagatagaaatgataaagaattaactgggaagattatttatgattatattaaagaaaagagcttaaatgttttagattatagtaccattaaagaagataaagatgctattaaggaaaagttaatctatttatgtgaggagctaaaaagtgatgttgtattaacaaacggaggaacaggattttctaaaagagatgtgatgcctgaagcaactcttgaagttattgaaaaacaaataccaggattctcagagataataagatgtaagacttatgatatgactaaggaggctatattatatcgtggaattagtggaatcagaaataaaagtataataataaatcttgatgggagacctaactatataagacaaagccttgatttaattataggacctttaatatatggagttaaaattctgaaggaaagcgtttcggattctataatagaaaaaatagtaaactgcaaacaataatttaaaaaatcatatatgtcaataataaaactgatggtataaggtatcattagtttttttatttatgataaaatatagttagtatgattatagggagatgttattattggataaaattaatgaattaaaaaagatagttgctgaaagttctagtatagtcttttttggaggggctggagtttctacggagagtaatatacctgattttagatctgaaaatggtttgtataaaactaaaaataacttttcatacccaccagaggttatgttaagtcatactttttttaaaaatcatacagaagatttttttgaattttatagagaaaaaatgatatttaaagatgcaaaaccaaatgccgctcattattcattggcaaagattgaggagcaaggtaagcttaaagcaatagtaacgcaaaacatagacggacttcatcaacttgcaggctctaaaaatgtatatgagctccatggttctattcatagaaattattgtatggattgtggaaagtctttcgatttagagtatgttataaaaagcgaaacaactatccctaaatgtgataagtgtggtggaatagttaaaccagatgttgttttgtatgaagagggattagatgatagtataatacaaaattcagttaaggctataagtgaggcagatactcttatagtaggaggaacgtcgcttgttgtatatccagcagctggacttataagatactttaaaggaaataagttaattcttataaataaatcagctacagcttacgataatgaagcagatttagttataagtgatagtataggtaaggtattagaaactgtaatataattttattttgtgaggtttatataaatgagtaaggtaatattccacgttgatgtaaattcagcatttctttcgtggactgctgttgaaaaacttaaaaacggagaggatatcgacataagaaaagtaccatcagttataggtggggacgagaagtcaaggcatggagtggttcttgcaaaatcaactccggctaaaaagtatgggatagtaacaggtgaaagcctctaccatgcaagaaagaaatgccctaatatactagtgtttcctccgcgatttgatacttacagaaaagcaagtgaaagcatgatgaatttacttaaaagatttacacctcatatagaaaagtattcaattgacgagtgttttatggatgtgactaatgatttaagaggaatggaaagcgtagagtttgcgagcataattaaggagagaataaaaaatgagttggggtttactgttaatgtaggaatatctactaatagacttttagctaagatggcatcggaactgaataaacctgacaagataaacacattgtataaacatgaaattaaagataaaatgtggccattacctgttggtgagctatttatggttgggaaaagtatgaagaggaagttaaatgaactacacattaaaaccattggtgaacttgcaaaatatgatgttaatattcttaaagccaagtttaaaagtcatggaaatatggtttgggaatatgctaatggaatagataattcggatataagtagatacagagatgaaataaagtgcataagtaatgaaacaacactatctatggatttaacagatacggaaaagattcataaaatactagtaaccttatgcgaaaatttaggtcaaaggcttagagatgctaacaaatactgcacatcaatttctgtaaatataagaactagtgattttagaaactactcccatcagaaaaagctaaagaatgctgtgagtagtactagagatatcatactttatgcagataagatatttaatgaaatgtggggaagagaacctataagacttttgggagttcagctttctggattatgtagtggaagcagtgttcaaatatctatgtttgatgaaaaaactgatactagaaatgagattttagataagacattagattctataagaaaaaaatacggtgacaatgttattatgaggtcagttttattagaaaaagaagaaaaataaagttatgcacaaaaataaatttaataagctaattatccacaaacaaaccttaattaaaaagataaatgtggataagataagtccggttaataagaagttttctatattaagcggactttaaattattttaacgaaattctttgtttttgaatacttttgttcccagtgagactgaagccacaaatattaaagctgtaagtataaatatatatataggacattctacatttagagaatttttaacgttaaagaacatacctttacatatataagaataaggaataaaagtagaaaaactatagcagcttgctacgaaattaggaagacttaaaactatgccaattactaatgggagtgcaaagtttttaaaattcatgcttaaaaaatgttgaatacatataagaggcaaagaaaatagaagtcctatgatagggccataaaatataaatgcctttacagtttcttttggtagaaggacttttacagatataaatatgattataatatacaaaataatatttataaaagctattacaaaagtactgaatatcttgcttaagtagatatctttatgggatttatcagtaattaaaatattatttatattgttatttttaaattcaactctccattgaagagatactaatgctgacaaaaatacagggaagaggattccgccatataaagaggaactttgtacgtatatggcattccacatttcacttgtaccagaaattttaacacttccagtataaatatttaaaagaccaatagatactaatagtagaggaaagaaaaacgcaagtattgctccaagcatagattttaattttagtaattcacatttgataagtttacacataataatcactcccttatgtccttaaaattgaaagttataattccgatgattaagaataaaacgcaataaattagagaaacaataattgattgtcttaaaatagttgtattagaaaaaggtgttgagtttgaaaaatacaagtatggtatatatggtattaaaccatcacttaagtgtatagcgttaaagccaactgcagctaaaagagaaacaatagtagaagttgtaatatcctttaataaagatatcagaaatagttgaaaactaactaagcctaaagaacaaagtaattcaaaggatatatagcgtacaatgacaccatcattaaaagtaaaaggaatattaaatatttttgcttcaactactaaaatgcatacaccaatcaatatcattaaaatagtagatagcattagtaacatccatttggcaaggtatatgtttcttcttttaagattacttgaacatatagaggttaaggaatcatttgaagtctcaatgtaaaatacatagatacttattgatatcacaaataaaagaagtataatatgccaagctagcatggagtgattggcaaagagtagacttgagaaactattttttaatccgccataggctataaaactttttttcctaaagtaaaggcctatacataacatagaagtagataaaagcaccggaaaaaggaacaagaattttataaggctttttctaaatttcataaattctaattttaaacaagtaagagtctccatttattgtctacctcctattaaatctataaatatatcttcaagtcttgcgtccggcttatatttagactttaagtttgaaagagaaccttcgtaaagaagtgtgcccttattgattattcctacatcatcaatcattagttccatttcgcttaaaatatgagaacttatgataatggttttattgtgctttttagctaaatttactataagatttctaatttcttttatacccattggatctaaaccgttagtaggctcatcaagtattatgagttctgggtttccaattaaagcttgtgctatgccaagtctttgcttcattccaagagaaaacttacttaccttcttttttctatgctcataaagattaactagttttaaaacttcatctatagcatttttatcaacaccctttatatatgaccatatctttaaattttcgtaagcatttaaatgaccataataagaaggggattctactaatgcacctacattctttaatatttcagctctattttcttttaggttttttccgaagatttttatactaccggaagaattttttattagtcctaatatcattcttatggtagttgattttccagcaccatttggacctagaaaaccgtaaattcttccttctctaatattaaggtttatattatttacagcattaaatcctctgtaagttttacttaaattattaatttcaacaacataattgttcatttatatcactcctatacatgtctttcaaagttcattaacttgactatgggtaaattataatatgccaagcttatctctatttaatctcaaccttaaataaaccttaactatttgtttattaattgaaatagataaggaatgtatattatcatatttaaggaggtgttacttatgaagaatatagaagacagcaaaattcttcttgtggatgatgaagaaagtatattaaaattattgactacagtacttaaaaaggaagggttcagtaatgtaataacaagtacaaatggaatggatggagtaaaaaagtgcagagaaaatgcaccggaaattattattctagatataatgcttccagacatagatggatttgaagtatttagacaaataagaaactttagctctgttccaataatgttcttgtcagcgaaaagtgaagatacagataaaataataggacttggtcttggggcagatgactatattacaaaaccattttcacctaaagaggttgctcttagagttaaggctcatcttaagagaattgaaatggttaagaaatcattgactaatagagagaatataataaagactgaacactttaccattgattttgaaaaaggtgaaattataaaaaatgataaaagtactattttaagagcaaaggaattattacttctaaagtatctagttgaaaataaaaacataatactttctaaagaaaagatagtaaatgctgtttgggaagatgattatgttggatatgataatactataatggtacatataagaaagcttagacaaaaacttgaggatgatccttcaaatccaaaatatattttaactgttaaggggttaggatataaactaaagctctaggaaaggataagttatgaaaagaaaatcatctaattatataaagattaccagcctatttactaaaagtatagtaatgatatttgtgataatgttttttgtagacatgcttatcatgataaaagtaacagaatatagaccaacattaactcaagacccagcacagtttacaagtgatatgggaaagtacatagaaataagtcacaatagggcgtatataaatgataacggtaaaaagatattaaaggataaaaatgcatggattcaaattgtagataataaattaacggaagcatactcatataagaaacctaaaaatgttcctaaacaatatacgccaatagaatttgtacatgtttataaatacgatactgttaactctacattattcataggagaaaaaaataaattttcttactttattggatttcctatagataaaattgcaaaatataatgtggagtataatccacataacattaagacgataatcggcggcggaatattggcaatactagccgctaatctaataataattttaatatttggatatatttattttgctcgtaagatgggtaaacccttagagaaagtacttatttatatagaagagctttctaatggtaattataaaattaatgaaagagaaaagggaatatataagtatgtattcaaaaatttaaatgtactgtctaaagtattaatggataataaaaatagaaaaaagaaaatagatgaattaagggatcagtggatttcatctatagggcatgatatgaaaacaccattatcatcaataaagggattctcagaaattcttaaagataatgaatatgattttgaaaaagatgaagttagggaatatgcaggtattatatatgataagtcgttgtacatggaagaattaatcaatgatttgaattttagctataagcttagaaacaattgcgttaatataaagaagaaaaaaatttattttagtcaatggttaaaagatatagtttataagctacattcatcaccggagtttaaagatagaaacgtaaatattgataagataaatgaaaatcttattgtagatatagatgagcttatgatgaaaagagcatttgtaaatattattacgaactttctaatgtataatgataatagatctactatagaagtaggggtaaaaatagaggaaggatttattaaaactactataaaagacaatggaaaaggcatacctgaaaaagatattgaacatatatttgaaagatactatagaggaacaaacacaacttcaaattcaaaggggtcaggacttggaatggcaatagctaatgatattgtaaagttacatgaaggattttgtgatgttaaaagtaaagagggtgagggaacagaactaactatattcttaaagtataataattaaaaaatgcattgacaatatatttaaatgtgttatgatagtattccaatcttgagttgattgttttgatagttgaaaatgttaatgagagatttggaatatatcattagattattggcatataaagccagaataatttttttgcaggggatacctctaattgcaaagaagtacttataatatttggagcaatttaccttgaataataaatttaaaaatctattgacattatgattaaatatgttatgatattattcctggcatagttgaggaaaatgattaacgtattaaagctcaatagctagttatagtaattatcttgtaaagtcaatttgtaaagaataattttgaaaaatgtattgacaagaaagataaatatgatataattaatatctaatcacaaccaattaaattaacaactaaaaaatatgttgacaatataaatttgttgtgataatataattaagctgtctagtgcagcaaacaattgaactttgaaaattaaacagagaattaaagaaccagcaattcttttaaatagaatttattctatttaaataaatttagcgatgagctaaaggaatacagactagcatctgtattatatcaaacttttaaattgagagtttgatcctggctcaggacgaacgctggcggcgtgcttaacacatgcaagtcgagcggggaacttcggttcccagcggcggacgggtgagtaacacgtgggtaacctacctcatagtggggaatagcctttcgaaaggaagattaataccgcataatactcgagaatcgcatgattcttgagccaaaggatttattcgctatgagatggacccgcggcgcattagcttgttggtgaggtaacggctcaccaaggcttcgatgcgtagccgacctgagagggtgatcggccacattggaactgagacacggtccagactcctacgggaggcagcagtggggaatattgcacaatgggggaaaccctaatgcagcaacgccgcgtgagtgatgaaggtcttcggatcgtaaaactctgtcttatgggacgataatgacggtaccataggaggaagccacggctaactacgtgccagcagccgcggtaatacgtaggtggcaagcgttgtccggatttactgggcgtaaaggatgtgtaggcggatatttaagtgagatgtgaaatccccgggcttaacttgggggctgcatttcaaactggatgtctggagtgcaggagaggaaggcagaattcctagtgtagcggtgaaatgcgtagagattaggaagaataccagtggcgaaggcggccttctggactgtaactgacgctgaggcatgaaagcgtggggagcaaacaggattagataccctggtagtccacgccgtaaacgatgaatactaggtgtaggaggtatcgactccttctgtgccgcagttaacacaataagtattccgcctgggaagtacggtcgcaagattaaaactcaaaggaattgacggggacccgcacaagcagcggagcatgtggtttaattcgaagcaacgcgaagaaccttacctagacttgacatctcctgaattagtccgtaatggatgaagtcccttcggggacaggatgacaggtggtgcatggttgtcgtcagctcgtgtcgtgagatgttgggttaagtcccgcaacgagcgcaacccttatcattagttgctaacatttagttgagcactctagtgagactgcccgggttaaccgggaggaaggtggggatgacgtcaaatcatcatgccccttatgtctagggctacacacgtgctacaatggtggggacaaaaagatgcaataccgcaaggtggagcaaaactcaaaaccctatcccagttcggattgtaggctgaaactcgcctacatgaagccggagttgctagtaatcgcgaatcagaatgtcgcggtgaatacgttcccgggtcttgtacacaccgcccgtcacaccatgagagtcggcaacacccgaagcccgtgaggtaaccttttggaaccagcggtcgaaggtggggttgataattggggtgaagtcgtaacaaggtagccgtaggagaacctgcggctggatcacctcctttctaaggagtcgacatggaaatgtaatttccatgaaggttctttgttctctgtttaattttgagagtttaattctctctaaatttgtactttgaaaattgcatagtaatcaatatagagtaatactctaaagcaaggcaaagttaattctttgttgtttgaatttaaatatatttacttaaggtcaagctacaaagggcgcatggtgaatgccttggcactaggagccgatgaaggacgtgataagctgcgataagcttcgggtaggcgcaaatagcctgtgaaccgaagatttccgaatgaggaaactctcatgggtaaccccatgaactgtatactgaattcataggtatatagaggtaaacccggggaactgaaacatctaagtacctggaggaagagaaagaaaaatcgatttccttagtagcggcgagcgaaacggaaagagcccaaaccggaaacttgtttccggggttgcggtcagatcattaaggctttatatcttaaccgaagatttctggaaagttaaaccatagaaggtaatagtcctgtaggtaaaaagagaaaaaagcccgatctgtaccagagtaccacgagacacgtgaaaccttgtgggaagctgggaggaccacctcccaaggctaaatactacctagtgaccgatagtgaagaagtaccgtgagggaaaggtgaaaagaaccccaggaggggagtgaaatagaacctgaaaccgtgtgtccacaaccgatcaaaacacgttaatgtgtgatgatgtgctttttgtagaacgagccagcgagttacggtatgcagcaaggttaagcacttaaggtgcgcagccgaagggaaaccaagtctgaatagggcgtatagttgcatgctgtagacccgaaaccgggtgacctatccatggccagggtgaagcggaagtaaaattccgtggaggcccgaaccacaatggtgttgaaaaaccatgggatgagctgtggataggggagaaattccaatcgaactcggatatagctggttctcctcgaaatagctttagggctagcgccatgaatgagtaccggaggtagagcactgaatgaggtaggggctgacaacagttaccgaactttatcaaactccgaatgctggatacttgaatcatggtagtcagactgcgaatgataagatccgtagtcaaaagggaaacagcccagatcaccagctaaggtcccaaagtatagattaagtggtaaaggatgtgggatttctaagacaactaggatgttggctcagaagcagccatacattaaaagagtgcgtaatagctcactagtcaagagatcctgcgccgaaaatgtccggggctaaaatctaacaccgaagctgtgaacttgtacttcgtacaagtggtagaggagcatcctgtatgggctgaagtcgtaccgaaaggagcggtggactgtacaggagagagtatgctggcataagtagcgagaactaagtgagaatcttagtggtcgaaaacctaaggtttcctggggaaggttcgtccgcccagggtaagtcgggacctaagccgaggccgaaaggcgtaggtgatggacaatcggttgatattccgataccgcagagtaacgttatgagaaatgggatgacgcaggaggataggatatgcgtacgttattggaagtacgtctaagcactgaggatgaaagataggaaaatccgtctttcgttaagtctggggtgtaatggtaaggtagtttactaccgaaatatctgatttcatgctgccaagaaaagtctctatccaggagctctgtgcccgtaccgcaaaccgacacaggtaggtgaggagagaatcctaagaccatcggaagaattgctgttaaggaactcggcaaattgaccccgtaacttcgggagaaggggtgcctacgagagtaggtcgcagagaataggcccaagcaactgtttatcaaaaacacaggtttctgctaaagcgaaagctgaagtataggagctgacgcctgcccggtgctggaaggttaaggggaatgcttagcgtaagcgaaggcatgaacttaagccccagtaaacggcggccgtaactataacggtcctaaggtagcgaaattccttgtcgggtaagttccgacccgcacgaatggcgtaatgatttgggcactgtctcaacagcaaatccggcgaaattgtagtgcaagtgaagatgcttgctacccgcgattggacggaaagaccccgtagagctttactgtatcttagcattgaatctcggtattgtctgtacagaataggtgggagacttggaagcagttccgtcagggattgtggagtcgtctttgggataccaccctgacagtactggggttctaaccggaggccatgaaactggtcacgggacatagctaggagggcagtttgactggggcggtcgcctcctaaaaagtaacggaggcgcccaaaggttccctcagcgcggttggaaaccgcgcgtagagtgcaaaggcagaagggagcctgactgcgacacaaacaagtggagcagagacgaaagtcgggcttagtgatccggtgacacctcgtgggagggtcatcgctcaacggataaaagctacctcggggataacaggctgatctcccccaagagtccacatcgacggggaggtttggcacctcgatgtcggctcgtcgcatcctggggctgaagtaggtcccaagggttgggctgttcgcccattaaagcggcacgcgagctgggttcagaacgtcgtgagacagttcggtccctatccgtcgcgggcgaaggaaatttgagaggagctgtccttagtacgagaggaccgggatggactgacctctggtgtaccagttgtcttaccaaaggcacggctgggtagctatgtcgggaagggataaacgctgaaggcatctaagcgtgaagcccacctcaagattagatttcccataacataagttagtaagacccctgtaagaacaacaggtgataggtcagaggtgtaagaatggtaacattttaagctgactgatactaataggtcgagggcttgaccaatataaaagtaaatatattaagattactatgcaattttgaaagtacaaagtactttcgaaaactaaataaattaatccggtgactatagcttggttgtaacacccgttcccataccgaacacgaaggttaagaaccaaagcgccgatggtactgcaggggcagccctgtgggacagtaggtcattgccgggtagagaagtgaatgttttaataatggagcattcacttttctactccaagaggaaattatcctcatgaaaaataattataaaatatgtattgactttataattaaatgtgatatgatagtattcgttgtctcaagtttgttacttttaaaaataaaaaagtttttaaaagatgttgacaaatcttgctgaaaatgatattatatataagctgtctagtgcagcgaacaattgaactttgaaaattaaacagagaattaaagaaccagcaattcttttgaatagaatttattctatttaaataaatttagcgatgagctaaaggaatacagattagcatctgtattatatcaaacttttaaattgagagtttgatcctggctcaggacgaacgctggcggcgtgcttaacacatgcaagtcgagcggggaacttcggttcccagcggcggacgggtgagtaacacgtgggtaacctacctcatagtggggaatagcctttcgaaaggaagattaataccgcataatactcgagaatcgcatgattcttgagccaaaggatttattcgctatgagatggacccgcggcgcattagcttgttggtgaggtaacggctcaccaaggcttcgatgcgtagccgacctgagagggtgatcggccacattggaactgagacacggtccagactcctacgggaggcagcagtggggaatattgcacaatgggggaaaccctgatgcagcaacgccgcgtgagtgatgaaggtcttcggatcgtaaaactctgtcttatgggacgataatgacggtaccataggaggaagccacggctaactacgtgccagcagccgcggtaatacgtaggtggcaagcgttgtccggatttactgggcgtaaaggatgtgtaggcggatatttaagtgagatgtgaaatccccgggcttaacttgggggctgcatttcaaactggatgtctggagtgcaggagaggaaggcagaattcctagtgtagcggtgaaatgcgtagagattaggaagaataccagtggcgaaggcggccttctggactgtaactgacgctgaggcatgaaagcgtggggagcaaacaggattagataccctggtagtccacgccgtaaacgatgaatactaggtgtaggaggtatcgactccttctgtgccgcagttaacacaataagtattccgcctgggaagtacggtcgcaagattaaaactcaaaggaattgacggggacccgcacaagcagcggagcatgtggtttaattcgaagcaacgcgaagaaccttacctagacttgacatctcctgaattagtccgtaatggatgaagtcccttcggggacaggatgacaggtggtgcatggttgtcgtcagctcgtgtcgtgagatgttgggttaagtcccgcaacgagcgcaacccttatcattagttgctaacatttagttgagcactctagtgagactgcccgggttaaccgggaggaaggtggggatgacgtcaaatcatcatgccccttatgtctagggctacacacgtgctacaatggtggggacaaaaagatgcaataccgcaaggtggagcaaaactcaaaaccccatcccagttcggattgtaggctgaaactcgcctacatgaagccggagttgctagtaatcgcgaatcagaatgtcgcggtgaatacgttcccgggtcttgtacacaccgcccgtcacaccatgagagtcggcaacacccgaagcccgtgaggtaaccttttggaaccagcggtcgaaggtggggttgataattggggtgaagtcgtaacaaggtagccgtaggagaacctgcggctggatcacctcctttctaaggagtcgacatggaaatgtaatttccatgaaggttctttgttctctgtttaattttgagagtttaattctctctaaatttgtactttgaaaattgcatagtaatcaatatagagtaatactctaaagcaaggcaaagttaattctttgttgtttgaatttaaatatatttacttaaggtcaagctacaaagggcgcatggtgaatgccttggcactagaagccgatgaaggacgtgataagctgcgataagcttcgggtaggcgcagatagcctgtgaaccgaagatttccgaatgaggaaactctcatgggtaaccccatgaactgtatactgaattcataggtatatagaggtaaacccggggaactgaaacatctaagtacctggaggaagagaaagaaaaatcgatttccttagtagcggcgagcgaaacggaaagagcccaaaccggaaacttgtttccggggttgcggtcagatcattaaggctttatatcttaaccgaagatttctggaaagttaaaccatagaaggtaatagtcctgtaggtaaaaagagaaaaaagcccgatctgtaccagagtaccacgagacacgtgaaaccttgtgggaagctgggaggaccacctcccaaggctaaatactacctagtgaccgatagtgaagaagtaccgtgagggaaaggtgaaaagaaccccaggaggggagtgaaatagaacctgaaaccgtgtgtccacaaccgatcaaaacacgttaatgtgtgatgatgtgctttttgtagaacgagccagcgagttacggtatgcagcaaggttaagcacttaaggtgagcagccgaagggaaaccaagtctgaatagggcgtatagttgcatgctgtagacccgaaaccgggtgacctatccatggccagggtgaagcggaagtaaaattccgtggaggcccgaaccacaatggtgttgaaaaaccatgggatgagctgtggataggggagaaattccaatcgaactcggatatagctggttctcctcgaaatagctttagggctagcgccatgaatgagtaccggaggtagagcactgaatgaggtaggggctgacaacagttaccgaactttatcaaactccgaatgctggatacttgaatcatggtagtcagactgcgaatgataagatccgtagtcaaaagggaaacagcccagatcaccagctaaggtcccaaagtatagattaagtggtaaaggatgtgggatttctaagacaactaggatgttggctcagaagcagccatacattaaaagagtgcgtgatagctcactagtcaagagatcctgcgccgaaaatgtccggggctaaaatctaacaccgaagctgtgaacttgtacttcgtacaagtggtagaggagcatcctgtatgggctgaagtcgtacccaaaggagcggtggactgtacaggagagagtatgctggcataagtagcgagaactaagtgagaatcttagtggtcgaaaacctaaggtttcctggggaaggttcgtccgcccagggtaagtcgggacctaagccgaggccgaaaggcgtaggtgatggacaatcggttgatattccgataccgcagagtaacgttatgagaaatgggatgacgcaggaggataggatatgcgtacgttattggaagtacgtctaagcactgaggatgaaagataggaaaatccgtctttcgttaagtctggggtgtaatggtgaggtagtttactaccgaaatatctgatttcatgctgccaagaaaagtctctatccaggagctctgtgcccgtaccgcaaaccgacacaggtaggtgaggagagaatcctaagaccatcggaagaattgctgttaaggaactcggcaaattgaccccgtaacttcgggagaaggggtgcctacgagagtaggtcgcagagaataggcccaagcaactgtttatcaaaaacacaggtttctgctaaagcgaaagctgaagtataggagctgacgcctgcccggtgctggaaggttaaggggaatgcttagcgcaagcgaaggcatgaacttaagccccagtaaacggcggccgtaactataacggtcctaaggtagcgaaattccttgtcgggtaagttccgacccgcacgaatggcgtaatgatttgggcactgtctcaacagcaaatccggcgaaattgtagtgcaagtgaagatgcttgctacccgcgattggacggaaagaccccgtagagctttactgtatcttagcattgaatctcggtattgtctgtacagaataggtgggagacttggaagcagttccgtcagggattgtggagtcgtctttgggataccaccctgacagtactggggttctaaccggaggccatgaaactggtcacgggacatagctaggagggcagtttgactggggcggtcgcctcctaaaaagtaacggaggcgcccaaaggttccctcagcgcggttggaaaccgcgcgtagagtgcaaaggcagaagggagcctgactgcgacacaaacaagtggagcagagacgaaagtcgggcttagtgatccggtgacacctcgtgggagggtcatcgctcaacggataaaagctacctcggggataacaggctgatctcccccaagagtccacatcgacggggaggtttggcacctcgatgtcggctcgtcgcatcctggggctgaagtaggtcccaagggttgggctgttcgcccattaaagcggcacgcgagctgggttcagaacgtcgtgagacagttcggtccctatccgtcgcgggcgaaggaaatttgagaggagctgtccttagtacgagaggaccgggatggactgacctctggtgtaccagttgtcttaccaaaggcacggctgggtagctatgtcgggaagggataaacgctgaaggcatctaagcgtgaagcccacctcaagattagatttcccataacataagttagtaagacccctgtaagaacaacaggtgataggtcagaggtgtaagaatggtaacattttaagctgactgatactaataggtcgagggcttgaccaatataaaggtaaatatattaagattactatgcaattttgaaagtacaaagtactttcgaaaactaaataaattaatccggtgatcatagcttggttgtaacaccagttcccataccgaacacgaaggttaagaaccaaagcgccgatgcgtactgcaggggcaaccgtgtgtcaaatgaggtcattgccgggtagagaagtgaatgttttaataatggagcattcacttttctactccaagaggaaattatcctcatgaaaaataattataaaatatgtattgactttataattaaatgtgatatgatagtattcgttgtctcaagtttgttacttttaaaaataaaaaagtttttaaaagatgttgacaaatcttgctgaaaatgatattatatataagctgtctagtgcagcgaacaattgaactttgaaaattaaacagagaattaaagaaccagcaattcttttgaatagaatttattctatttaaataaatttagcgatgagctaaaggaatacagattagcatctgtattatatcaaacttttaaattgagagtttgatcctggctcaggacgaacgctggcggcgtgcttaacacatgcaagtcgagcggggaacttcggttcccagcggcggacgggtgagtaccacgtgggtaacctacctcatagtggggaatagcctttcgaaaggaagattaataccgcataatactcgagaatcgcatgattcttgagccaaaggatttattcgctatgagatggacccgcggcgcattagcttgttggtgaggtaacggctcaccaaggcttcgatgcgtagccgacctgagagggtgatcggccacattggaactgagacacggtccagactcctacgggaggcagcagtggggaatattgcacaatgggggaaaccctgatgcagcaacgccgcgtgagtgatgaaggtcttcggatcgtaaaactctgtcttatgggacgataatgacggtaccataggaggaagccacggctaactacgtgccagcagccgcggtaatacgtaggtggcaagcgttgtccggatttactgggcgtaaaggatgtgtaggcggatatttaagtgagatgtgaaatccccgggcttaacttgggggctgcatttcaaactggatgtctggagtgcaggagaggaaggcagaattcctagtgtagcggtgaaatgcgtagagattaggaagaataccagtggcgaaggcggccttctggactgtaactgacgctgaggcatgaaagcgtggggagcaaacaggattagataccctggtagtccacgccgtaaacgatgaatactaggtgtaggaggtatcgactccttctgtgccgcagttaacacaataagtattccgcctgggaagtacggtcgcaagattaaaactcaaaggaattgacggggacccgcacaagcagcggagcatgtggtttaattcgaagcaacgcgaagaaccttacctagacttgacatctcctgaattagtccgtaatggatgaagtcccttcggggacaggatgacaggtggtgcatggttgtcgtcagctcgtgtcgtgagatgttgggttaagtcccgcaacgagcgcaacccttatcattagttgctaacatttagttgagcactctagtgagactgcccgggttaaccgggaggaaggtggggatgacgtcaaatcatcatgccccttatgtctagggctacacacgtgctacaatggtggggacaaaaagatgcaataccgcaaggtggagcaaaactcaaaaccctatcccagttcggattgtaggctgaaactcgcctacatgaagccggagttgctagtaatcgcgaatcagaatgtcgcggtgaatacgttcccgggtcttgtacacaccgcccgtcacaccatgagagtcggcaacacccgaagcccgtgaggtaaccttttggaaccagcggtcgaaggtggggttgataattggggtgaagtcgtaacaaggtagccgtaggagaacctgcggctggatcacctcctttctaaggagtcgacatggaaatgtaatttccatgaaggttctttgttctctgtttaattttgagagtttaattctctctaatttgtactttgaaaattgcatagtaatcaatatagagtaatactctaaagcaaggcaaagttaattctttgttgtttgaatttaaatatatttacttaaggtcaagctacaaagggcgcatggtgaatgccttggccctaggagccgatgaaggacgtgataagctgcgataagcttcgggtaggcgcaaatagcctgtgaaccgaagatttccgaatgaggaaactctcatgggtaaccccatgaactgtatactgaattcataggtatatagaggtaaacccggggaactgaaacatctaagtacctggaggaagagaaagaaaaatcgatttccttagtagcggcgagcgaaacggaaagagcccaaaccggaaacttgtttccggggttgcggtcagatcattaaggctttatatcttaaccgaagatttctggaaagttaaaccatagaaggtaatagtcctgtaggtaaaaagagaaaaaagcccgatctgtaccagagtaccacgagacacgtgaaaccttgtgggaagctgggaggaccacctcccaaggctaaatactacctagtgaccgatagtgaagaagtaccgtgagggaaaggtgaaaagaaccccaggaggggagtgaaatagaacctgaaaccgtgtgtccacaaccgatcaaaacacgttaatgtgtgatgatgtgctttttgtagaacgagccagcgagttacggtatgcagcaaggttaagcacttaaggtgcgcagccgaagggaaaccaagtctgaatagggcgtatagttgcatgctgtagacccgaaaccgggtgacctatccatggccagggtgaagcggaagtaaaattccgtggaggcccgaaccacaatggtgttgaaaaaccatgggatgagctgtggataggggagaaattccaatcgaactcggatatagctggttctcctcgaaatagctttagggctagcgccatgaatgagtaccggaggtagagcactgaatgaggtaggggctgacaacagttaccgaactttatcaaactccgaatgctggatacttgaatcatggtagtcagactgcgaatgataagatccgtagtcaaaagggaaacagcccagatcaccagctaaggtcccaaagtatagattaagtggtaaaggatgtgggatttctaagacaactaggatgttggctcagaagcagccatacattaaaagagtgcgtaatagctcactagtcaagagatcctgcgccgaaaatgtccggggctaaaatctaacaccgaagctgtgaacttgtacttcgtacaagtggtagaggagcatcctgtatgggctgaagtcgtaccgaaaggagcggtggactgtacaggagagagtatgctggcataagtagcgagaactaagtgagaatcttagtggtcgaaaacctaaggtttcctggggaaggtttgtccgcccagggtaagtcgggacctaagccgaggccgaaaggcgtaggtgatggacaatcggttgatattccgataccgcagagtaacgttatgagaaatgggatgacgcaggaggataggatatgcgtacgttattggaagtacgcctaagcactgaggatgaaagataggaaaatccgtctttcgttaagtctggggtgtaatggtgaggtagtttactaccgaaatatctgatttcatgctgccaagaaaagtctctatccaggagttctgtgcccgtaccgcaaaccgacacaggtaggtgaggagagaatcctaagaccatcggaagaattgctgttaaggaactcggcaaattgaccccgtaacttcgggagaaggggtgcctacgagagtaggtcgcagagaataggcccaagcaactgtttatcaaaaacacaggtttctgctaaagcgaaagctgaagtataggagctgacgcctgcccggtgctggaaggttaaggggaatgcttagcgcaagcgaaggcatgaacttaagccccagtaaacggcggccgtaactataacggtcctaaggtagcgaaattccttgtcgggtaagttccgacccgcacgaatggcgtaatgatttgggcactgtctcaacagcaaatccggcgaaattgtagtgcaagtgaagatgcttgctacccgcgattggacggaaagaccccgtagagctttactgtatcttagcattgaatctcggtattgtctgtacagaataggtgggagacttggaagcagttccgtcagggattgtggagtcgtctttgggataccaccctgacagtactggggttctaaccggaggccatgaaactggtcacgggacatagctaggagggcagtttgactggggcggtcgcctcctaaaaagtaacggaggcgcccaaaggttccctcagcgcggttggaaaccgcgcgtagagtgcaaaggcagaagggagcctgactgcgacacaaacaagtggagcagagacgaaagtcgggcttagtgatccggtgacacctcgtgggagggtcatcgctcaacggataaaagctacctcggggataacaggctgatctcccccaagagtccacatcgacggggaggtttggcacctcgatgtcggctcgtcgcatcctggggctgaagtaggtcccaagggttgggctgttcgcccattaaagcggcacgcgagctgggttcagaacgtcgtgagacagttcggtccctatccgtcgcgggcgaaggaaatttgagaggagctgtccttagtacgagaggaccgggatggactgacctctggtgtaccagttgtcttaccaaaggcacggctgggtagctatgtcgggaagggataaacgctgaaggcatctaagcgtgaagcccacctcaagattagatttcccataacataagttagtaagacccctgtaagaacaacaggtgataggtcagaggtgtaagaatggtaacattttaagctgactgatactaataggtcgagggcttgaccaatataaaagtaaatatattaagattactatgcaattttgaaagtacaaagtactttcgaaaactaaataaattaatccggtgaccatagcttggttgtaacacccgttcccataccgaacacgaaggttaagaaccaaagcgccgatggtactgcaggggcagccctgtgggacagtaggtcattgccgggtaatgtttggccagatagctcagtcggtagagcagaggactgaaaatcctcgtgtccctggttcgattcctggtctggccaccattatttagttttggcgctatagccaagtggtaaggcagaggtctgcaaaacctttatccccagttcaaatctgggtggcgcctccaattatataaatggttttaaagtggtttacatatataacttattctataagttgtatatgtaaaccacttttattttatgtaaataatataatgaagtataaaaagattgaactgtatgttagaatataagtaatataatttataggtgtggatggtgaatacagtgatacgtgaatatataaaaaataatgttttagttacggatggggcaatgggaacatattattctaaaaccactggagattataataatttttgtgaatttgctaatttaactaatccagaagtaatacttaatatccataaagagtatataaagtcgggagctaaacttattagaacaaatacattttcagcaaatactttaactatggatatatcgaagacagaattagaaaatataataactaaagggtatatgatagctagaaaggcagcagaaggtaaggagatttttatagctgcagatataggacctattaacaaatttgaaatagagaaaccagtggagtacataatagaagaatataaatttgtagtagatatttttatgaatttgggagcagatatttttgtatttgaaacattaagtagtatagattgtttgaaagaggtttttcaatatataaagagaaagaacaagaatgcatttatcttggctcagtttgcaattatgcaagatggttttacaagagagggtattagtgtaaatagtattgtaaataagataaaagctattgggagtatagatgcatatggatttaattgtggatctgggccagcacatttatataatataataaagggattagatatatatggagatataatatcgacacttcctaatgcaggatatcctgaaataattaatgaacgcatggtatatgtagacaatcctgattattttgcagataaaatgtcaatgattaaaaacagaggagttaaaatagtagggggatgctgtggaactacaccaaaacatatagaaaaaatggtaagtaatttaaaagaaaatctaattaacatagaagaaatagaaataaaaaaaaataagggtataaataattataaaaagaagaatagttttactgaaaaattagataaaggtgaatttcctatagttgttgaattagaccctccatttgatacaaatatagataagattatgtatgcagctaaggtatgcaagcaaaataacatagatcttgtaaccattgcagattcaccaatgtcaaaagttagagtggattcagtaatgattgcatctaaaattaaaagagaactaggaatagaagttatgccgcatatatgttgtagagataagaatgtaaatgcaataaggtcaagtttacttgcagcacacatagaaggaataaggaatatacttgctataactggagatccagttacgggaattgataaggttaatactaaaagtgtttttaatttaaattcatataagcttatgaatcttataagtgaaatgaataaagaaacatttaaggaagataagataagtataggtggagcacttaatttgaatgtattgaataaggaagttgaagtaacaaggatgctaaagaaagtagaaaatggaggtacattttttctaactcaacctatatttaaagaagagactattgagttcttagctaagcttaagaaagatagaaatataaaaattataggaggagttctccctatagtaagttatagaaatattcagtttataaataacgagctcttcggagttgatatacctaaagaatatattgagagatttagtgtggatatgacaagacaagaggcagaagaagtgggagtaaatttagctagggaacttatagctaaaattaggaactatgtagatggtatatatattgttacaccatttaatagaatcggtatggtaatgaaaatactcgaaaatgttaggaagtgatttttattaaagctgtcatagatagatttgaggacgaatttgctgtttgtgaaaagcaagatagaaaaataatcaatattctaagaaaaaggattcctcagaatgcaaaagagggtactgttttaaatttcaatgatgatggtagcattacgattaatttcgaagaaactattaaaagaaaaagagaaatagaagagattatgaaagatctatttacgtaaataacaaccttaacatagaaaattagagtgagcgttctttacaataatatctataaaaaaattaaatttgtatatgtaatttaatttttttatttcgtgtaaattgtatttttatagaagaaaaagaagtaaaaaacaagtagtatatgtaaaaagaatgtaataagtggcatatattagaaataatatagcatcaataataaaagtaatgtaattaatatgcattaaaactacatattaacacataaaaaatgaaacaatatatgtattttgtttcatattagtatttattatatcacttatactttaattttccaacagatagtaaaaatatatttttaatatacttttgttgaaatatgtttaaaatactgcattattatatgatattattttgttatgaaattataaaaaaacgtttcattatattttgcatgcataataaaatcacttaccatagtattgtctagaaataaagcatatacctaaaaatatgcaaaatactatgaaacaaaatacatatattgtttcatagtattttatttctttcgattatggtttttttaatatcaactaattgagtattgagaaattttatggttaaaaatgtaatggaggtgatttacgtaaggtcgtttatacttgtcatggtatgaaagagagctatattaaaaaaactagtgttggggataaagctttatatttaacctggggattaaagatataattggtttattgtaacaaagaagtgttgaaatcgttaaaaatatggtataagacaaatatagtaaattaataaatatagggaaaccagctcaacattagaaactggtttttctataatttttattttgatacaacaggatgagttatttgtaataccttctgagttgagttcatgtatatgggaacacctattggtaaagttaattttggataatcatgtccactcataaagtgtgttaaagtaggtttatttaagctgaagattttgtccttaaaaacctcttcaagagttaaacttctctcatagtgaggtaaagtgcaatttttgaattgacctaatataaaaccactacaagtcttaagttttccagaaagctcaatatgagttagcattctatctatagcataaggttcttcatgaacgtcttctataaataaaatattgtttttaaaatcaatttcgtaaggagttcctaaggtgttgcttattagcgataggttgcctccaaccaagtgtcctttagcctcgccttctacagcacaacttaattcaatgctactaggattcaatattctataagggacgtctccgttcattagtgtgttaaagaacgaatcaatagtatatttatcatcgaagttagaagtaaacataggaccatgaaaggttacaaggccagatttagaatagaaagtgtttaaaaatgaggttatgtcactaaagcccacaaatattttaggattgtttcgtataacttcgaaatctatatatggtaaggttctcatggaaccgtatccgcctcgtacacataaaatcatatcaacagtatcatctttaaacatgtccataatatcatttgctctatctttatcttcaccagcaaggtagccacgcttatcataaacgtgtttgccaagctttattttaaaaccacgattttcaaaaaaattaatagctttttcaatagatttaggattttcaggacttgatggagatataattcctatggtatctccagttttaagtttcttacctaacaaaattatcaccctcttagtttaaaaagtattctttttatataagaatatacctgttatacctgatattattgccataaggccgcatatcacccaaaagccatatctataagttgctagaggaattccagctatgttcatggcgaatagattagaaatcattgtaggtatagataaaattattgttactgatgttaaaaattttattactacatttaggttgtttgatattattgaagcaaaggcatccatagtgccacttagtatatcactatatatacttgccatttcaatagcctgtttgttttcaataattacatcctcaagtacatcttgatcatcagtatatttttgcattacttctaatttaagcattttctctagagtaatttcatttgatttaagtgaggttgaaaaatacacaagtgatttttcaagtgataaaagctgtatgagttctttattctttaaagatttatgaagatgcttttctaccataagacttttcttgtcaatttgtctaagatataagagataataggttgctaccttatacaatatttgtaatataaatcttgaacgtttaaaggtaaagaaagttttaacttttccctctataaaatcagataatactttactattcttaaggcagattgttattatttctttttcagtgtgtattatagcaaggggataagtatcataggataaagagttgtcttccatttcagtaaaaggtatatcaacaataattaaaatgttattatcttctatttctaatctagaagtctcctcatcatccattgcggcgtttagaaaatccattggaacatttgtttttttctgtataagcattaactcttgtttagttggtgctgttacgtttatccaacagcctggttctacgttttcaagtctttcaagctttgatggattattgaaatcgacgcttttataaatggatatcatgtttattggtcctgtacaaagttttaaatattatttgtacagtgcctcccttctttaattcaattatagttatagatatattataactgctgagaagtcataaattcaatgagtaagttcttatttatgatttagttcactttttgcttcgaataaaagactgttattttctattaaatcaagagctgtaagagctaatgcttttgaggacttcataattatattatgagcataaggagtaattgtttcatctgaaaaagcctttgttccatattttattgaagaatctttcgttaatgatacatatggatgtatgcacggtatttcatgacttacaattccaaggcttagacaagaagagagatttttaactccatttatatttattatttcgctttcttttaagttgtgagaaaaaagccttgaaagagtggcattagatataagctctttgcagggagtatccttaatatgtaattcggattcgatggatactagattacataatcccattatgaactctttaattttatcttgctttccgagtatattttcagaagatgaagattttagagtaaaagttatctcagaacttttagactctgaattaactaaacttgataaactgagattatctatgcatgatttatattgggatatatttattaaatgatttagagtattgaaaataattaaagctgtattaaaggaggaggatgaatcatttgtattagttaaattattagtttttgataaaattagacttaaaggtagtgaggctatagaggtaccgctttctgcagtcacagtatgtggttgaacggttaaaactgcatccatatcttcaaaggtaccctgcttaaacattgttgtctttgatccgcgtttaaattcacctggacaacctaataatataacacttccaccaaccttaggaataacatgtgaaagcataagagcagctgcaacagaaatagtagttttagcattatatccatatatatgaccataattaacatctgcatcatattcacatatgaaacatatttttggatgtccttctccaaactgggataaaaaagctgtgtttatatctaagtaatttttaatattagtaaagttataagattctaaaagctttgttatatagctataggatttatattcatgaaagctttcttcagggttatcgtatagataacgtgtgagatcataaagtgcgctatcgattgtacttaaaaatgaaagcatttcttgtttcaagtttaatcacctcttattatgagtttttcagtactttctttattgttgacttaaaattaaaaatatattaaaaaaatattttggacaaaataaaattcagcagtatagtgaataaaatataatatacaggttatagtgattaaagattagtatgtttaaatagaccactacatttcattcatagggggtgtaatctatgaaaaaaacttgcattatatgcagaaagcctctaaaagatggtataataataaatggaaaaggtatttgtaaaagctgtgaaaagagattagttaagctacaatgtggaaatgatttttatgagtattacaaaaaatgcataaaagttagaataattcacaatgagagaagacgatataaaattggagcatatgaatgtataaaaactccatgatattataaggaagtgtgttaatattgtctaagacaccaatcatagatggaataatgaaatatataagtgaaaagaataatctgttttgcactccagggcataagggaggcagaggattcgcaaatagcgaaggtggcagaagcttatatgaaaatatcataaagatagatttaacagaagttgatggacttgataacttacatgatcctcaaggaattatcaaggaatcagaagagagacttagagatttatatgaaagtaaaaaatcatattttcttgttaacggaagtacaagtggtaatctcgctatgatattttcatgttttaatgagggagacaaggtaatagttgaaagaaattgccataaatctatatttaatggaattatacttaggaagcttaatcctgtgtatataaaaaattactttgacgaggatataaatgctcctttatctatagatgaggagtattttttcaagattataagagaaaatatggatgcaaaagggataatacttacatatcctaattactatggagtatgctgtgaccttgaagctatagtgagagaggcaaaaaaatataatatgaaggtattagttgactctgctcatggcgctcattttggtatatcagagaagttaccagaaagtgctgttaagttaggagcagatatggttgttatgagttgtcataaaacgcttccgagtttcacacaaactgcatttcttcatttatgtggagatgtcgaggaaagcaaagttgatttttatgtaagttcatttttgagtacaagcccatcgtatatgtttatgagctcaatggattatgctagatgctatcttgaggaaagaggaaagcatgattatgataacctggtagatttatgtataaagtattcaaaaaagattaatgaaatcaatggattgcatgtattaggtaagagtgatttaaggataaatggtaaggtgcttaattttgatgcaacaagattagttatcaatgtagaggatggttgcagtgggtttaaattatatacgtatttaaaagaaaatagaatacaacctgaaatgtgcgatcatagaaatgttgttttaatttgttcaccatttgacggagaattgcagttacaaaacttatataatacacttagaaaatgcaatattataaaattaaatgacgataataaggtatctgtgcttttgtcatctatgccagaaaataaatttgccccgtatgaggtattgaatttagaaagtgaaaagatcaatattaaagatagtgtgggaaaagtgtgtaaaaaagcattagtgccatatccacctggaataccggtgattatgccaggagaagtaataaatgaaaatgttgttgatattatattgaaagctgttaaagataacattacagttttaggaattgaaaatcgaaataaagaaattaccatagatgtagtttgtgaagattaagtaatttggaggaatataatgggcaaaatattttgtttgtttggtaaaagtaattcaggtaaggataccatatttaaaaaactcagagatgatgatagtatgaaactaaaacctatagtgacatatactacaagacctaaaagggataaggaaaaagatggtgttgaatattattttattgatgaaaaaaaattaaatgaatacgaaagtatgggaaaaataatagaaaaaaggacctacagtacagtaatggggaagtggcattactccaccattgatgatggacaaattgattttgaaagtgggaattatatacttataacaacgcttgaggcatataagagcataagaaattattttggagagaataggatcatgcctttttatataaatgttgatgatggcataagacttgaaagagcattaaaaagagagaagggtcaacacaatccaaattatgaggaagtgtgtaggagatttttggctgataataatgactttagtgaagaaaaattgaaggaatgcggaattaaaaaatattataataattatgatcttgaaaagtgtctttgtgaaataaaaaacgatatcaatgagaatatttaaatgtatctaaaaacatagaatttacataaaaatgtgttaaaataaatataaagattataaaaggaggggtaaaatgaaattagttatatgtattgttcaagatgatgacgcgggtgagttaattgacgttttaacagacaaaggattaagagtaactaagttagctactacaggtggatttctaaaggcaggtaataccacattaatgataggagttgaagaaaaggcagtagatggtgttatagaaacaatagaagatgtatgcaaaacgcgtcagcaagttgtaacatcaccttctccagttgcaggttccacaggagtatatgtgccttatccaattgatgttgaggttggtggtgcaactatatttgtggtggatgttgataaatttattaaaatataatagaggaagaagtctccatgaaatttgaaaatatatttggacatgaagctgttagaaaacaatttgatgaattagttaaaaataaacgttttccacatgcaattatgttatgtggagaagatggcataggaaagagtattgtagcaaaagaaattgctgcaaagcttttaaataagactgagataaaggaatacgcagatttaatagagtggaaaatattaaatgataaaaaaagcatatctgtagatcaagttaggaaaataatagaagaagtaaataaaaaaccatatgaaggcaataataaactaatagtagttcatgatatggattatatgactattcaaggccaaaatgcctttttaaaaacaatagaagagcctcctttaggtgtatatataatattattgtgtcagtctcagggtagggttcttgatactgtaagatcaaggtgtcaaatttataagctaaatcgtcttgatgaacacgaaatgagaaagtttataagtggtacctataatgtaacaaatgaagatgagatgagaacattattagcatttagtgacggtattcctggcaaggtggatgattttttaaatgataaatccttaaaagagataaggaatatggtcataaatgctattttaaatataaaaaagcttaatcccaaagatattgtggatgctgcaaatcagctttctgagtataaaaaattgtggcgtgaaatttgtaattattttgttttgtatataagagatgcacttgtatacaaggaaacaggaaacaaggaacttttgataaatttagataaaattgaggatataaagaagatagctagtcaattttccatgaaacagctcaatagaatggtagaagctgttaattatggacagtcaaacttagaaacaaatgttaatatgcctttaacttatgttgaaatgttgtttaaaatacaggaggtctaatatgataacagttgtgggagtgagatttaaaaaggcaggaaagatatattacttttctcccggggatctcaatataaacaaaggtgatgacgttatagttgagacagcaagaggaattgaatacggtaattgtgttataggattgaagcaggtaggggaagagagtatagtttctcctttgaaaagcgttataagagtagcaacagatgaggacgagataaaatatagagaaaataagaacaaggaaaaagaggctttcaatatttgcttgagtaaaataaaaaagcacgaacttgtaatgaaattaatagatgtagagtatacttttgataataataaaataatattttacttcacagctgaaggtagagttgactttagagaacttgttaaagacctagcttctgtatttagaactaggattgagttaagacagataggggtaagggatgaagctaaaatgataggtggctttggagtatgcggaagacctatgtgttgtgccctctatttaggtgattttgcaccagtttcaataaaaatggccaaagaacagaacctatcgcttaacccttctaaaatttcaggagtgtgtggaaggctcatgtgttgtttgaactatgagcaggaaacttatgaaactataagaaaaagaatgcctaaagttggatctatagtaagtacaaaagagtatggtaaggctgaagttgtagataacaatataataaaagaagctgttaaaattaaatttactgcagaagacggagaatcaatttctgaagccgaagttcatataaaggatttaaaactgatatctggttcatatgagggaaatgtagatgagtctcaaataaagctagagcttgaagatgtagacgcaaaagaagtaaaagaattatttaagactgattaggaggcactaaaagatgaggacagttttaaaaataagtaatatgactacttcaggcgatatatcaagggttagaggttccatatctagaaatgaaggaataatagcatttcatatagatagggataagctagaagttgaagtgatttacgatgatagactcctaaatatagatgatatgattgattcaatagaaaaattaggatacataataatttaaagtacaatacaacgtgtcctaaaaattatataaatattgtttgaaatttatcgaaatcatgttacaatgtacgtgtagtatttaacgcctattaagataaggaggtgtatttagtatggcatataaaataacagacgcttgtgttagttgtggttcatgtgcttcagaatgtccagttagcgctataagccaaggagatactcaattcgtaattgatgctgatacatgcattgaatgtggaaactgtgctaatgtttgcccagtaggagctccagttcaagagtaataaaataaataaaaagttcgcacaaaaagtgcgaactttttatttattttactttaagtttagtatatgctgtagttttgtataatatatacctttaaaatataggataattatttaactaactttaaatataattgtaaactaatcatactaatttacgataatagactataggctttttttgattttgcatattggaatacatatataaattttataagttttcttaaccgacgggtattaaggaggagaatggtttggatagtattgtatttgtgttagtggcacttgtgtctgttatagttggatttattattgatggtggttcagttataaatcttatacatgtttcaccagcgataattgtttttggaggaactataggagcagtaggtacatcatttccgattggagatattaaaaaacttggaagtattgttaaggttgcactttcaaaacctaaatcagatttacctgcacttatagcttattttaagcaaatagccttcaaaacaagaaaagaaggtttgttaagtatagaagaaatgatatctgatgagagtgtagatccatttattaaaaaaggacttcagatggtagtagacggtattgaaccgcagacagttaaagatacattggaattaagtgttgaattaatagaagaaagacataatatgggtgcgtctatatttcaggcagcaggtggatatgctcctactcttggaattataggtactgtatgtagtcttgttgttgttcttgcaaatttaagtagtgatacatctcagcttggtgaatctatatcatctgcatttttggctacactttatggtataagtagtgcgaacttagtttatttaccaatagctaataaacttaagagatataatgcaatagagatacaggaaaaaaacttgataatcgaagcaatactttgtattcaggaaggtataaatccaaatacactcgatgaaaaacttaaaggatttttggacaagaagcaacttcaacagtatgaaagtatgggtgcaggagaaggtgaataaatttgaaaaggaaaaaacacgaggaaccggaaaattcagaacgttggcttttgacatattcagatttaataacgcttcttatggcattttttatagttatgtatgcctcaagtacagtgagtaaggaaaagtttgctcaaattgcgcaatctcttaaagttggtttcaacggtgctagtggtaaaacagttattggtaatcaggatgctgtagacataaagtccacaagcagttatgttactcaagaagctagtaagcaaagcgcttctgctgaaaaagcagaggaaaataaacttaaggatgtaaagaaaaagatagaccagtatgtaaaccaaaacggtatgcagggcagtgttagcacaaatttacaggaaaaaggattagtagttagtatagttgatacactcatgtttgatacaggaagagcagaggtaaaaccggactttcagaaaaagttagttgagataggagaaatattaaaaactattgataactatataagaatcgaagggcatacggataatacccctataagcaattctcaatatgcatcaaatattgaactaggctctgctagatcaaataatgttgaacacctttttatagatgtttctaaaataccagttactcaaatgtacacagtaagttatgcggatacaagacctgtggcagataataattcagaagcaggaaaagctagaaatagaagagttgatattgtaatattgaatagtaaatttaatgctgtggaacaagagagcagcggcaaataaggagtaaaacaaggaattgagcatacattccttgtttttattttgtagaaaaaagacataatgtataatataattaatagggttttaataataatttaggaagtgaacttatggatttggttaaaatagatgaaacacttgatgatttgcaaataaaggatattcatataatacaaaaaaaagaaggctttagatttggagttgatgcagttttactagccaattatgccaaagttaaaagcaatcaaactgtaatagatttatgtagtggcacaggaataattccatttattatacagggaaaaaaatctccaaggcatattacaggaattgaaattcaggaagatatggtacagatggctaatagaactgttttatataataaatttcaagagaaaataaaatttataaatgaagatattaaaaatttggctgaattaaaaaagttagaaagagtagatgttgtaacagtaaatccaccatataagcttagaaattctggaattgtaaatgaatttgataaaaatgctattgcaagacatgagatatgctgcactttagaagatgtaataaaggcggctagaactctcttaaaagacaatggtagactttttatggtgcatagacccgaaagacttgcggatatactatgtcttatgagagagtataaaatagaaccaaagtctataaaaatggtttatcccagtgtaaataaagcaccaaatatagttttaatagaggggcaaagagacggaggagcatttttaaagtgggaaaagtctctctatatacacaaagagaatggggagtatacagaggaattgaatgagatatatggaaggtagggataattaggtatgaataatggaaaattatttttggttggaacacctataggaaatttaaaggatataacattaagggctttagagacacttcagaattgcgatgttattgcagcagaggatacaagacaaagtttaaagcttttgaaccatttcgatataaaaaaacctttaataagttatcataaatttaatgagaataacagaagttctgagttaatggatatggttagagaaggcaaaaaagtagctttagttactgatgcaggtatgcctggaatttctgatcctggaagtgttatagtagagaagttcatagaaaataatcttgaatttgaggttataccgggtcctactgctctaattacagctttagtatactctggtttagatacctccaaatttgtatttagaggctttctacctaaggagacaaaagatagaaaaatagtgatggaggaagtaaagaatgttaaggatactttaattttttatgaagcacctcataaactattaaatacattagggtttttgttcgataatcttggtgatagggaaatagctatatgtagggaattaacaaagcttcatgaagagataaaacatacaaccttaaagagtgcaattgaattttatgagagtactaaacctaagggtgaatacgtactaattatagaggggaaaagcgaagaggaaattgctattgaaaaaatgtccgaatggcaagatattaatgttgaagaacatataataaagtgtatggaagaaggactgtccaaaaaagaagctataaagaaggttgctaaggctagaaatctttctaaatctgaggtgtataaatattctataggtataaattgatttataatcttttaataactttgaataatctttttattgtatggtatgcttttaaaacctcaaatatagtgttagatgtacaggttgtaaattatgcggagataatgttataatataagcaatatcataaaattgaataaaaaaatgtatagtctttttttatgggcaagtgtgaaaatatttacaatggaatcaagggggagatacgtagtgcacaaaaggatattgtcgactgtagtcgcttttggtatagtagcgtctatggggtctactagcgtttttgcggcgccgcttcaagatgcgcaaagcaagtatgatgcgtcacataaaaatgtgcagaatttagaagaagatatacagaagatggacaaccagatagaaactataatgagccaaagggacagtgttgataagaaaataactcaatcacagcagaatataaatcaggctcagaacgacatagcagtttctaaagaaaacataagagaagagaaagataagtttgcagacagagttagagcattatacataagcggtagcacacaaagttatgttgatatactgcttaaatcaaaaagttttagtgatatgatatctagaatagatgctataaagcaaatttcagattatgatcaaaagcttgtatcaaatttaaaggattctcagggtagaatagaagctaaaaaagataagattgtatcagaaaagcagcaacttgaagctttaaataaagaaaacgatactaaactaaaacaattaaatgatgaaaaatctaagcaaaatgttcttattgcacaggcaaaagctgatgagagcaaaaatgctgcagaagttaaagctgagaaggatgcagaaaaggcagcagcgcaggctagacttgtagcagcagcaaatacagcagcaagcagtgcaccagccaaagcagtagctaaggcacaagcacctataccaaggggcgtcagccattctagttttgctggaagtggtaatgatgttgtaagttttgcagaaagctttagtggtcttccatatatatggggagcagaggatcctagccgtggcttcgattgttctggattagtacaatacgtttatggacattttggagttagtcttggtagaacaacttatgaacaggtaaaccaaggtactacagttacagctcttcaaccaggagatttattgttctttggacctgcatcagcaccatatcatgttgcaatttatgcaggaaataatgaaatggttgaagctccgcgtacaggagaaaatgtaagaaaaactgctgttagaggctatagtatagctaaaagagtaagatagaacttgaaaatcagggcgcaaattttattatttgtcgccctttttaataatttagtaaaactcaatataaaaggggagaagtggaatgcacagaaagtttttaactgcgcttatagctttgggtatcacggtatcttgcagcggtaatattgtgtttgcaagcccacttcaagatcaatataaccaaagccagcagcaatatcaaaatgcgctgaaaagtgtacaggatatagaaaacaaaatagaggcattggataaccaaataggagaattaaacaacagcataaatgatactgacaaaagaataaatgagagtaaacaaaatatggcgataacacaaggaaaaatagatcaagcaaaacaaaatataacgaatcagcaggagatatatggtgaaagattacgtgctatgtatgtgaatggaacaacagcgcaatacataggagtaattttagaaagtcaaagttttagtgatttaatttcgaggttagatgcagtaaaagatgtaataaattatgataagggaataatcaataattttaaaactcaaaagcaggaagtagagaatcagcagaagattttagctgatcaaaatagtaagcttgtggcgcttcaaaatgaaaaccataagaaattagatgatttaaataataaaaagaatacccaaaatagccttatagtagcagcaaaggatgaagaagcaaagcataccaatgagatgcagcaaatacaaaaggctatggatgatgagaagaaaaaaatagaggcacttaatgtctctactaatatacagttaaaaccagtatcaaaaactactagtcagaatactacaatacagagttcaagtacaaatggacttgccgtggttaaatatgcagaaacgtttttaaatactccttatgtatggggaggaaacaagcctggtggttttgattgctcaggacttgtgcagtatgtatatgctcattttggaattaatcttcctagaactacttatgagcaagttaatcaaggaaatcctgttacaggaaataacttgcagccaggagatttacttttctttgaaccaggaagtaatggtccagagcatgttggaatttatgtaggagatggtaactttatagaagcacctcatactggtgcaaatgttagattttctcctttgagaagttactgtgctgcaagaagaatagtaaactaatttgaatataataaatagactgccaagtttggcagtctatttattataaataaaaatatagctcgaaatattatctaccttcttttaattcttcaagacaatgcttacatatgttttttcctctatagttgataacatcgcttgcatctccgcagaatatacatgcaggttcatatttctttaaaatgatttgctcaccatctacataaatttctaaagcgtctttttctgctatatttaaagttcttcttaactctataggtattacaattctacctaattcatctactcttctaactacacctgttgatttcattttgaattcctccttaaattacattatccgacaaacattgcaattaaataataacaaatattacattaaaagtcaatgaataaaatataatgttttaaatttagttacaatttttttagtaacttccatctaatgttaatatactaccatataattgaaaagtcaatgctttttttcatattaatacaaaaaatttccatatgctacaggctagaaataccaatgtaaataaaaaattttaagtaatatattgcttaaattaccataataattgcctactttttgcatatagtccatgtgtaaaaatatagcaaaacaaaaaagtaattatatgggttaaatttaacaaagtgtcgaaatgttaacaaaaaaataaaaattagtttaggttttcgactttctgtgtatatcgcaaaaattaaaatggtataattgttttaagaggtgattgttgtgaatgatattataaagctaataaagagcataattattgaaatggatatggaagcttacatagttggtggatatataagagataaacttatgaatcctaaaaactctgcttcagatttagatattgcttttcagggagattttgaaaaaattttagatgagctcagaaagagaaaaattaaggttagttctataaaaaaagactcaagtgtgtatagaattaccgttaatggttattgtgcagatatatcaaagataaaaggaaaaaatataaatgaggatttatctaaaagagattttacggtaaatgctatagcgttagatataaagaacaataaaatagtagatccatttgatggaagagtacatattaaaagaagaatactgcaggttatagatgaaaagagctttgaagatgatgctgttaggatacttagagggataagattttatataaaatatggtatgcacttcaatggctatactgaagagtatattagaaagcattcaaagaatataatgaaatttcctagagatagagttctagatgaaattattcacattatacatgaggatgaaaatggagtattttttgaagtcatggatcagtatatgattttgaagaatatactgccttatatggaagagctaaaaacagtaggaaagtgtaaacatcatcttgttgatgcatttacccatatgaatactgcctatcacgtatttaaggacatgaagaaaaaatatttaaaagttaagaatattaacattgaagagtttaataaagatataggagtatataatgaattggattatctagcctttgctatttttactcatgatataggcaaatatgtgagctataaaaaggaaggacaaaaaataagctttaaaggacatgacgaaaaaggtcttgaaattattgaaaaagtatgtgatgaattgaagtttcctaatgatggaaagaaaatagtatgttctgttgttaaaaaccacatgtatccacttatgctttttaaattaaaggaagatgagcgaaaacaagaagagtatgagttctttaataagtttgatcaatatgttcctcatattatagttgcttccttttgtgatgtgtatgctacaacaatttacattgatgagaataatgaaaaggataggtttacaagttttatttcagagttagtagttaaatacagagaattcataaatctaaagaaaattaagtatatagatggaaatgatttaatagacatggggtttagaggcaatgacataggaaatatactcaatgaacttaataagatgctttatattgagggaagtaagactaagaaagagcagcaggattttgttttaaggatgaaagataagctttagaattcgatatgtaattattgcatgtattcacagcatggtgtgtaaaatttataggaaacttattaacatattgttgataatgtgcatattaggagaaataaagagaaatatatcgaaaataagagcaattacaatgtgcattatgcacaaaactgtggacaaaattgtggataatgtggataaccttattcatgacgtgaaaatatcttgataactgtgcataactcaaaaaatgaagcgctgaataaactatatttattcagcgcttcatttttttgttcgaaattagtaaaaaattatcgagggagattttcataagcagatgctgcaaaattaaagtccttttcatccgttatttctccataggagtcttctgaaatacctggagtgtagtagagaataaatctttctgaattcataagattttcaattaatatatatcttttatcctctaaaatatcttggacaatagctagtacagaatacctatcgtcaactccagtagaattgttagtaagatttaaaattttatttttccagagtaccacgtttgtacgcttatgatcacaataggctactacttttccatcactgcagccattgcaagaatcaaatttacactcacaagtacattttaagcatgtacattttgagcaattttctagttgattcaagtcagcctgatgatcggatttatatccttcgagtagatttatatatttgtttccattaaatagattttctataagaccactttttttactatcagcttcagctgagtctaataactctatatatttagataaaatatgctctctcgatacatattttctattatttaatgcatccttatcaagaaagtcagatatatcatttattgcaaatgatatatctgagaatattttgccatagtgatctttctctaattttataaagtcttctgtcttactcataggttactccttatttaatattgtttttgtattttgcaagttcatcatcaagatttgtttcatttaatttttcaaattccttttcaagagaatcttcatttcttaagtcaccaagtccttcagccatagcttcttttctttcgatttttctttctatgtcatcaagatttatgctatttgagccagtatctacattggataaaacttcatttacctttttggtagcttcagcattgttaaatcttgcagcagcttcgtctctataagctcttgttttttctatttcttcttctaaagttcttagcttatcttttataactttagatttttgcgaagcatcttcgtagctcttttgaagagattcacagcgtttgtctgcatctaattttctttctaaagctctcttagctaaatcatcgtttccattctttacagcaagctttactttagagtcatagtcttctgattctaatcttgctttttgaagttttttctctatttcatgtgcattaccaagtatttgtgctgaagaaatttttgctttattaaggctttcctccatatctcttattttttgatcaagtaattctataggattttccatttcatctaaagtattatttacctttgcctttaccatattagatactcttttaaatattcccataatattttcctcctaaaataatttaatttgttgttaaatattttgattattttctcattcgctttataaatttgtatataattactaccactactataaacaaaattaatttgaatataaaaggtataaagaaaaatgagctgtagccatatccataaccgggtctataataactgtgaccaaaaaaaggtattggtattggtatgtaagttcttttaggtgaagatgatgatgaatttgaactactattagaaccaaaaccgctagatgatctagaagaagaactgctgctagaatgtgagttactaaagcttccagacttaaatccgccgcttccagaacttgaatgagaactgaagctgcctgagtgaaaacctcctcttggtgatgcgtatactgtattagtataatttatagtatttgataaatagttattaatattaattggagtaattatatttacacttaaaaaaataaaaacaaaaagaaaacacgatattagattttttcgtttgattttgagcacctcctatattcatataaacctaagataattatataataaaatatgtctcttgaatatgaatttgcaaaatcaaaatttaatatgtattaattaatttatgaatagattatataatatataataccatattacaatatataaataaacttattttatctttaagataaccttttaatgtaaagaaaatgtacaagcatagtttagcttaagatagcgttaatttgcatacttttatggatagaaaataacttgtaatgagtttataattaacttataatttaaatgagaataagatttgtgtaattatagaatatattttatataaaatggtttagatggaggtataggttatggaagaggagtttagtgtaagctctatgaaaaaaatagtagaagagatgtcagcgaatagtataatatcctatgatgaattgccacaattagatttgtttttatcgcaggttatagattttttaaatgataaatttgaaagtgaaaaatatacaaataacatagttcagaattatataaagggcggtgttatatccaaacctgaagatggtaggaaaaaaggatatacaaaggatcatatagctcagctattattactaagttatatgagaccggttttgaacacagaggaaataaagaaggtttttagattagccttcaatgaaataaatgacagagatgatgatataatatcgtggaaacaagcttataaagtgttttctgatgtacaggaagaatattttaataatatatttacagaacaatattttaatactgataaactgaagaacatagtaaaagaatttaatttggataaaaaagatgaagacagaatatttatgtttattgtagtaatgagtttggttgctcaggccagtgttataaaaaacatagctaagaaaatagtggatgaatataaaggtgatgagtaggaggaaatgcagtggaagaggctttgaaacttgtaaagccatcaataaatcttaaggacaaatttcagagtatggccattcaatataaaacgtatggtgaaagagaatattttgaaatgtacaaaaaatcattagaggattttgaaggctatttaattgaaatagaaaatcaagataaaggtataaacttaaaagagggctttgttccttgtgctacatattggatggttaatagtgatgaaaatatcttaggagtaataagaataagaaagaagctctctactgaaattttaaaaaaggttttaggaaatataggctatgacatagctccacttgaaagaaataagggatatggaaaacatattttaaaattaggactaaaaaaggctaaggagcttaatgttaatccagtattggtgacttgtgattttaaaaatattccttctaaaaaaattattgaatacaatggtggtgttttcgataatgaggtgtttgatgaatggaaaaatagtatggttagaagatattggttctacaatgaataaatattcaaagctatgcatatataaaaaacggctaaatcttagtatagggatttcttgtttagaggaaatccctatatttttatcataaagcatattgataaattatttgtttcatgttataattattcaaaaataatgaataattataacacaagtaagcggttatagattagggggttcgtatgggatatttaaaaaatagaaactttttgtcattaatggatttcacgcctcaagatataaattatatgctggatttagcaaagaagttaaaggaagataaaagaaacggattagaggagcagtatttaaaaaagaagaacatagccttaatattcgaaaaagattctactagaacaagatgttcctttgaggttgcggcacatgatcagggagcacatgctgtttatataggttctacaggtagtcaaataagtaaaaaggaatctataaaggacacagcaagagtgcttggtagaatgtttgatgcaattgagtacagaggttatggccaagaagtagttgaaatactagcagaacattctaatgttccagtgtggaacggacttacagatgaagagcaccctactcaggttattgcaaattttatgacattaaaggaaaagttcaataaaccactaaatgaaataaaatttgtgtattgtggagatgcaagaaataatgtttctaatgcacttatgataggagcagcaaaaatgggaatggattttagaattgcggcacctaaaagtttatttccaagcagtgaacttgttaagaaatgtatggatatagcagaattaacgggtggaaagataactctaagcgatgaagtagatgaggcagtatttggtgctgatgtactttatacagatgtatgggtttctatgggggaagatagagaagtatggaaagagagacttaaaatgcttaaaccatatcagataaatatggagatgataagtaaaactaagaatcctaacgtgaaatttatgcactgtcttcctgcgtttcatgactttagcacagatgcagctaaagaaatttacgatgaatttaatgaaattccatttgaagttactgatgaggtatttgaaagtgattactcactagcttttgatgaagcggaaaataggcttcattcaataaaagctattatggttgcaacattaggtgatatataggtatgtttttataaatgagacaatgagctgtatgaaaaatcagctcatttttttgcgctaatttcagcagaaatatataataaaagctcaaactatcgcaaacaatactggaaactagtatatagtaagattattaatttatataatttttatatataatttattcacaattaagaatgggatagtaacatataattacgatatgagattttttaaaatagaattaaggaggtggcatggattgtcaataaaaactaagttggtcttttctaatattgcaatgtgtctaattccactaatattatgtttgattactttatttggattgaataatttgtatagtagaaaattaaaatcctactatgaggtagaagatatgaaaaagaaaccattattgaatccatatatagaattaaagtctataaatataagaccatttaaggagcttcaaagtgaatccgaagctattccagataattttgaggataagaaggttctaaaaaccatcaatgaagcgcttttaaaaaagaatacatatataatagtggagaaaagtggaaatgttgttttcaatggaagtaagaagaacaacaaagatataattagtaagctcgatgatttaaattatagtcgcaatgcagatagaccagagccacctagaactgaaagcatttcagatgacagtgaaaccttaataagacaattcacatttatattttccgatggaagctcgggtaatgtttttcttgtagcagataccagtaaattatcacagttagcaacggaatttataatttctataataatagcaataatagcaataatatcacttactggaggttttataacattcttagtttcaagatcaatacttataccactaaatcagcttaaaattggtacagaaaaaatcaaacatggaaacttagattttaaggttagggctgaatccagtgatgaaataggtgaattatgcgatgcatttgatagcatgagaaaaaaacttaaggaatctgtagagcttcaggctcaatatgaaaataatagaaaagaattaatatctaatatatcacatgatcttaaaacaccaataacttcgataaagggatatattgaaggaataagggatggagtagctgatacgccagaaaaaatggagaaatacgtaaatactatatacaataaaactcaaagcatgaactacttaatagaagaattgttgacttattctaaattagatttgaagaagcttcctttctatttcatagatatggattttgttagctatatgaatgatttaatggaggaattcaaatttgatgtagaaaaaaacaatatggaattttcttatgataatcacataaagggtaaggctaatgttagaattgatgttcaaaatataaacagagttatatctaatataatttctaactctattaaatacatggataaggaacatggaaaaataagtgttgaagtagattctaacaatgaggaagtgttagttggaattaaagataatggaatgggtatatcagaagaagctcttccatatgtatttgatagattttatagagaagatttttctagaaatacctcaaaaggtggaagtgggttaggtttagctatatgtaaaaagataatagaggaacatggtggtagtatatgggcaaaaagccaaaagggtcacggaacggagatatggttttcaataaaactaaaaaatagaataaattaataaatgggggcttataggatgaataagaaaattattaatataattattggtgtcttggcagtttgcgttataagtggaggcggatactatttctacagtaaatcagctagtgctaaaaagttgtctactagtagatactatgcacaaactgctaagaaaagcaatattgacgttacagtatcaggaacgggaacagtagcagcggcacagacaaaggatgtagtagcaaataatgcagggactatagaaaatttagatgtaaatgtaggagatactgttacatcaggtcaagtaattggaaaagttcaaagcgatacaatagatcaacaagtaagtaaatcaagtttaacggttcagcagcagcagcttaatgtaaataatgcaaaaactgatgatgataagcagaaacaacaattgatacttgaatctaatgaaaatgatctcacaagcgcagaagaacaacaaagtaaaatgactttaacagcaccaataggtggactagttgtagcaaaaaataataatagtggagatactgctcagcagggaaaggcgcttattacaatagcagatacaagttctttgaagataaatctatctatagatgaacttgatatatctaaagtacaagttggccaaaaagcagatataaagtttgaagctataagtggtaaaacatattcaggaactgtacaggctatatctcagcttggagctactacgaataatgtaacaacttattctgtagttttaaatgtagataatgctgatgctgctataaaactaggtatgagtgctaacgttgatataaaagttgcttcaaaacaagatgcattggttattccagtcgaagcgcttattgagagaaatggtaagaagtatgtaagagttcaaagtagcagttcaggcacaagtagtcaaagaggctatagtaaatccagttcaagttcaggaaatgcatacaatagatcaggattttcaggaacaactaatgttggaagtctagttgaggttcaaacaggacttgaaaatgaaaactacgttgaaataacttcaggtataaaagaagggcaaaaggttatgattcaacttccccaaactacaagcactaattcacaaaataatagaagtggctttggaggtatgggaggttttggttcaatagggggccgaagtaacaataaatcgtctgcaaaataatttgtgaaagaaggtgtaaaaatgcctttatcaattcaaataaaaaatttaggtaagacttataaaatgggaagaaatgagtatatagccttgagtaacattaacttagaaatttcaaagggtgaatttgtatccattgtaggtccatcaggagcaggaaagtcaacgcttatgaatattataggatgtcttgataatgcaacagaaggagaatacttattagatggtgttagcacaaattgtaatgataataagttggcagaaataaggaataaaaaaataggttttatatttcaaaattataatttgctgcctaaactaagtgttagagaaaatgtagaacttccccttgtatatcaaggattaaattcaaatgaaataaaatatagagctcacgaagttataaaaaaggttggacttgaagaacacctaaatcataaaccgtcagaattatcgggaggacaaaagcagagagttgcaattgctagagcgttagcttctaaacctgaaataatattggcggatgaacctactggggcattagatagtaaaacgggaaaagaagttatagaaatgattaaagaaattaatgaagatggaaatacggttgttttaataactcatgatatgcaaatagcaaaagaagccaagagaatagttacagttaaggatggaaaaataatttcggataaatataataccaagtaaggagggaaataatatgcaattaacaaggcttataaaaatgtccattcaatctatttgggctaataaagtgagatcctttcttactatgcttgggataataattggtatagcatcagtaatagttctcgttggaataggccagggcactaaggaaagtgtatctagccaaattgaaagtcttggaacaaatcttatagctataaacatagttggaaatagaaataaggctatatctatgcaggaacttaatgatttaaagaaaaagccaggaataaaggatatagcaccggttttaacaaatagcgttaatgttaaggttggggataatactgcatcaacaagtatggaagcaagtacagctaattatgcacaaataaggaatctttctgtgagctctggaaggtttataaatagcagagatgtgaacaataggtataaggttgcggtagtaggggtggatgttgcaaatgagctttttaattctactgacgttgtcggacaaacaatgaatgttaatggagttgaatttactatagtgggaatactaaattcaacaggaagttcaatagccgggtctaatgatgataagataatagtaccattaagcacggcagaaaggcttacgcaaacaactcaaataaagacattttatgcagaggcagagagccaaggtacagtagatgaagctatgggatatctacaattatttttgaataataagtacagaagtgtagaagaaggtagcaataactccaattcaaataacaattatagaattcttagtcaatcaagcatattagagactgctacgcaaactactagtagcatgacaacaatgcttacaggtacggcagctatatcgcttttggttggtggcataggcattatgaatattatgctcgtttcagtaatagagagaactagagaaataggaataagaaaagcagttggagcaaaaagaagaaccatattaatacagtttttgatagaagcagctagtttaagtgctgttggaggaataattggagttgtaattggatacggaggggcgaagcttttggcagtgcttttaagggcaaatgtagcaatttcgggaaatgtagttttaggatcatttttattttccgtgcttgtgggaatagtatttggaatataccctgctaataaagcatcaaaacttagtcctatggaagctttgagatttgaataaaataaattgtaaagttataatgattaaaagaaataaattttatgcgtgaaaacatcggagaataatttggggtgataagatgaaaaaaattttaattattgaggacgagactagtatagctgagcttgaaaaagattatttagaacttagtaatttcaaagtagatatagaggtttcaggaaagacaggcttagaggcggcaaaggaaaaaaactatgaattaattatacttgatttaatgctgcctgaaatagatggttttgagatatgtaaacaaataagaaaaatcaagaacactcctattcttatggtgtcggctaaaaaggaagatatagataaaataagaggtttaggtcttggtgcggatgattatatgacaaagccatttagtcctagtgagcttgtggcaagagtaaaggctcatataagtagatatgaaaggcttgttaatagcagtaataaaaatttagatgatgagattgaaattagaggtctcaatataaacaaagcatcaagaaaagtattcgtaaatggaaaagagtctcaatttacagctaaggaatttgatcttttggtattcttagctcaaaatcccgatagagtatttagtaaggaagagttatttgataagatatggggaatggattcatttggtgaaatagcaacggttacagttcatataaagaagataagagaaaaaattgaaaaggatacttctaaccctgaatatattgaaaccgtgtggggtgcaggatataggtttagaggataaaaagatataggggaaggagtgtccccttatttttgtatagtgattttatgaaaaattatattgaataatgaaaaggttacggcagataatatactggtgatgagtaaatgttatataaaattaatttttatttaaaaagtttcaggatgcaattgcataaaattcatttctattacaatttataaagaaatgtgaataaattaataattaattataagagctatatatttaataaagtgataatatgtaatcctagatttattgttttatttataaatatactgtataattaattatatttaataatggagggtggtctagcgatggaggcaaatagtatagatgtaaacagcatactagctaataagaatttaattataaaatttcaacctgttgtatcagtgataaaaaaatctgtaattggtttagaggcggtttgtttaggttcttctgatgataatgggggaattatttctacatcaaaactttttaagactgccgaagagcaaggtgttttaattgagcttgacagactttatagagaaaaggcagttaaggagtttgttaaagtctacaaaaggaataaagaactacttttatttttagatattaatatatcaataatagataagtatgttggctctggaataataatgaacttgatatcggattctggaatatctactaataatgttgtgcttcaaattattgaaggaaaaatgactaatttagaagctcttaagaaatttatatatttatatagaagcaatggttttttagtagcgcttaaggatttagggacaggttttgccaatatggacaaaatatcttatgttgaaccagatattataaaaataaacagtgttttgactaaaggtatagaagttgactattatagacaagaagtattcagatcccttgttaatttatctaaaaagattggtgcgcttgttgtctgtgaggatatagcttcagagcaagagactatgatgataatggagcttggagcagatatgcttgaaggatcatattttgaaaatgattttgatttaggtgaaaaatttttagacgcaagtagaaagctcatagatgccacagcggtaaaatatgagaaatatacagaagaagaagtaaaagctaaggaaatgatttatagtggatatgattttgttataaatgaagctttaaaggaactttcatctttaacagaggataagtttgatgattctataaatacagttataaataagaatagcaagcttgaatgtgtatatgtacttaataaggaaggtattcaggtaggtagtactgctactaggtttacagatatggttccacaaagagcacttatatttgaaccagctcaaaaaggaactaatcattctttgaagaaatattattattttcttaaaacaatgagtcttaataaatatgtaacagagccatacatatcactagctacaggaaatttatgtataactatttctgcagtatttaaaaatttagaaggtaaagaatatatactatgtgttgactttaatcctaattatatgagtatgtaatttagataaaatataatttttaaaactagagggcttgataaaacttacacttattcaaaaagtatcgtttgatttatcatatttaaaatacagttgcttttgaactagagataagattatcctctagttttttttattttatttatatagttatctttatattatatcgaattgtatgttacaatataatataggtaaaaaatagaatttacatataggccttaccaacacaggctaaatatacataagataaaaaatataatatgatacaattgattgagagggattaaaatggattattctaaaatagaggattttcatgtcaacattaagaaagatcagcgaaataaaattatatttttattaatacttttttgtatgtattgtttcactcaaattttatttttaaattatgaattttacgcgaaaacaagtaatgtttttaaaatgatttttgatttaggtatcttaatttcatctattataacctacaagttttcgggcagaaagtcaattggccatacaaggtttggttttgcaattgtggttattatggattttatatctttggtcgttacattaaggtatggtagttttcctagagaaatctatagattcataagatgcagcgaaggtatgcaaagttttgttatttatacatatattgttggaattgtttttagaaatgttgatgatgaaaataaagataagtacgtaaaggttgtagagattatatcttttgtgagtttaactttattgatgatatcactagtacttgtagaaaaagtttttacttataaagttataactatatataaatttaatatattttgtgtttgtatatgcctattgataaccttaatatttatatacaatttatatagtagaatgaagtacattaaggataattgcttaattaagtggtatgttcttgtataccttgcagttattataccaaatgttttagccttaagtagtacccttatggaattaaggccttttatggaattcataagctcatttataatttatattacagtatcagagaaagtaataaataaaacaataaataatgctaaggctgaattttatagtttaaagagagataagctctcgtatagaggtgttctagaaaaactaaaagatggggttataataaaaaatgaagataaagtagtttttatgaatgaagctcaaaggaaaatgtttgggctgactaaagataaaactgttgaaggaatagatataaataaaattgtacatagatgctgctgtaaggcccaaaataatgagaagaaaataattacagctggcggtaaagagctatatttagaggttgaagcttttggtattacaattaatggcgaaaggcttacacttgatatagttaaagacgtttctgatgaaattcttgttaaaaaaagtaaagaagaaattgaaaaggtaaagaaaactgataagctcaaaggggaattttttaccaacataacacatgaacttagaactccaataaatgttatatacagtgcacttcaagttatggaaatgagaattgataaaaacaattttgataggcgcaatttaaataaatatatgaaagttttaaagcaaaattgctatagacttttgagaataataagtaatttaattgatataacaaaaattgatactggttttttaaaaccttgtgtaagcaacagagaaataataggccttatagaaaatataaccatgtccatagttccttatttacatgaaaaaggaatggaacttgtatttgatacagatgtagaagagaaatatgttcaatgtgatccagacatggtagaaagaattatgctaaatttgctttctaatgcagttaaatttagaaaggaaaaagggttagtgcttgtaacaatacatgataaaggatcaaggatagtgctaaaggttaaagataacggtataggaatacctaaagaaaagcagaaaatgatatttaaaagatttaagcaaattaatcctttgcatgtaactccacatcaagggagtggtataggactttctcttgtgaaatcaatagtggagatgaatggaggtaaaatatcggtagaaagtgaagaaaatgttggtaccactttcatcatagaatttccagcaattcaaaatgaaattatggaagaatacaagcaggttaagaaggttgatgataacagtataaaaaacatagttgagaaagttaacatagaatttgcagatatatatttggagtaaggtatatattagtaattaaaaaaaccgcctatataaggcggcttttttagaatggtttttgtttaatgttataaaactaaaataaaagctttgatatattccaaccccaggttggttctgcacccaatagagaacgtgttccagatgtatttaaagcaaaagctgatacaaatactattgcgcaaaggattaaaactaatataaatttattactcttttttggtaacatataaacatctcctatttacttacttaaactttattaaaaaatttaatattttatctatgtcttcggttttattattttgattaagaaattttaatagtttgtaaaaaatattagtacatactttttgctgagagttggaaagaacaacagcttctaaattaatctcttctaacttttcaaaatcattaagttgtatatataaatccgttaacaaggaaagcgttttttcctgcaaagagtacttgttatgatttttagaaagagtcaatgcttttaaaagatattcctcagctttctgtaaatcgcctaaataaataaatgctttagctgcgttaaagcatgcaacactcagataactatcatcttgagaacttgtaggaaatctatctaaaagcaaatttaaatatttaataacttcatcctttacatcctttttggcaaaagtatcaatcaaattggataaaattaataaatattgagacgattttatgttattggtatttaagaggttaaaaattcttaaataaatttcagcagcttcatcaatcctatttaaatcagataaacaacatgctttattatttaaaacatctataagtttagaagtattatctttaataagaggttcaaggttatcaataacttcgagagctttttcataatagtgcatgtagtaataacataatgcggtattaaataaaaatattgatatataatcgtcaggcatgtttttaaagtgatttaaagcaaaattacagcattcaatacttctatcgtattttaaagagtttaaatacatcaaggataatttccttaaaatactaagcaggcttttgttgtacgaggttttatccaatatatcaaaagccttttcgtagtacaatacgcttttagccaaatcattttgtatgtaaaaatagtctcctgctaactcgtaaatttgaaccttcttttcctttatatcccactgtattaggaattcttctgcgctttttaaagactcataaaatctgctacatttgtatacaagtaagttttttaattcgtcaacataattttctaatatggaatttgcttgagctagttcatcttctaaaagataatccgcagttacatccatttcaaggttattttttttagcgatttcctttaagttctttattattatttcggcagtactttttgtaagctttgccttgttatgttctatttgacttatgagattgcgagtaacttcttctccaacaatatcgtcttgtcttaggccgtatttttttcttattaattttattttatctccggatgataaaatttgacagtttcccataccaagtctccttataagtttattagcactaataatatccttacattacaataataacaaatatgatatttaatgtaaattgaacaataatgcgtaaaaatgactaaatagagctaaaaagtacgattacattcattttacaagaaatgactttttaaagctttaatttataaaaaataagttttaggattacatcataaactttatataataattatatgatgtaaacgtatttatatgctttgagtaatgtagaaaatattgtactatagttaataactagtgtaagagtaatcatataacaattttcaagaaatgttagtaggatcttgaataatacgtagtaattcatttcaattgtttagtttataattaaagagaatttagacttaaatataataattgaaacgatagaattttaatacacaattattgaagcgaatatattgaactgcagataatacatttgttttgtattacttaagggcactaaagttaatatgataagtaattttatcacaagatgatagattacagtttttcaaatgattttacaaaattattttggagtgttatcaaatcaaatattgtattgtctgcattatatataattaaattttgttctttctaagatacttcgttctaggatccatataaataagtaatttacctattttactataatataattatatcaaatatttttaaaaataagaactgaaaaaatgatgcttttacagctatttttaataaaatagagctattttagctaaataccatacttattcaaatattttccattagttttaacatgatgaagtgttttgctatgaatggattaatgcgtaaattctaagattccataagaaaagaaataattaaaaatttaagaagtgataagcaaatgtttaatgtttgattatcacttcttaagtttaatttataatttcaatgatgcctagtattataaaaagtattccagaaaaaagaggggtatactttcctaagaattttcctaatatgtgattgccaatatattctccaaataaaattgcaactatgcttagtgtaaaggtaaatataagtgtaaattgaatgcttacgccagtgatgcttgcggctacaccagttcctaggttattaaaggttaaaccaagggctactaagatagcttcctttatatctatatcgccagaattgtctaaatcggactcttcggcgtattttaccatatcagtgacatctttaacagctaagctttttgaagaagtatttttcttaagattaggtatactcacaattacaaaatatactcctagaataattataataacagcacctaaaatgtttgctgtgtgcttagacaagaatttagctatataggttccaacggtcattgatagaaatgtccctaaagaagttgttatagctattataagatttgctagtagtcctatttttatttttttgatgccataggccataccaacgactacgttgtctaagttagaagatatactaaacaataatgcagagaaaattaatatcatatagttacaatccctttttattggttatattctaatatattccttaagggattctttgttgtataacttatatagatttattaacagtatgctttttcttttttatatagtgtaatctttccttgaaaagtttttccctgccttcagtagttggaaaataatatttctcatcttttaaattatcaggtaagcactgcatgtcaactactttattatcaaaatcatgtgcatatttatagccttttgaatagcctaagtctgacattagttttgtaggagcattcctaaggtgaaggggtacaccagaggccaaggtttccttcgcatctttttttgccttttcataggccatgtaaatagagttggattttggtgctagtgaaagatatactacagcctctgtaagattaacgctgcattcaggcattccgatataatgacaagagttatacacattaacagtaacatttaatgcattcgtatcagcaactccaatatcttcagaagaaaaacgtataagtcttctggctatataaagaggatcttctcctccctcaagcattctagcaagccagtaaatagcagcatctacatcgctgtttctcatggatttatgtagagcagaaattaaattatagtgttcttctccatttttatcgtatatgagagctttgttttgcatacagtcctctagtatacctttatttatagttaccacaccatgttctaatttactgcttaaaacggccatttcaagaacgttaagggcggttcttgcatctccattagaatatacagctattaaggttaaaaggtcttctgagatttgaatatttttatttttaaagcctctagtatcggttaaagcattttttagaagttttacaatgtcattattagaaagtggctttaacacaaaaactctgcatcttgaaagtaaggcagaattaacttcgaaggaggggttctcggtggttgccccaattagaataatatctcctttttcaacatgagggagaaaggtatcctgttgagatttattgaatctatgaatttcatctataaataacaaggtacgaataccaaataatctatctttctctgcttttatcataatatccttaatttcttttataccagaggttgcagcactaaactcaacaaagttacattttgtcgttgaagcaattatcatggcaagagtagttttaccaacaccaggaggcccccacaaaatcatggaggtaatgctgtctttttcaagcatatttctaagtgccttgcctttttctaaaatatgttcttggcctatatagtcacttaaatttctaggacgcatacgacctgctaaagggatgttttcaatgttttcaaatagtgaaccctgtgtataattcacaataatacctcctttaaaatgcgaacatatgtttttatgtaattatatcactaaaaatagtttttatacaaatttttattgtatgacgataattattattatataataaaaataatcaataattgatttagaggtgatatttatggagataagagaaggaatgaaagcgccagatttttctcttaaaggatcagatggtaaggaacataaattaagtgattatattgggaaaaaagtaattctttatttttatcctaaggacaatacacaaggatgcactaaagaagcttgtgaatttagagatagttctaataaaattagtgatttaaatgcggttgtacttggagtaagtaaggattcaataaagtcacataataattttattgataaatttaagctgccatttgtactactttcagatgaagaagaagttgtatgcaaattatacgatgtgattaaagagaagagcatgtatggaagaaaatatatgggtgttgagagaagtactttcataatagatgaaaatggaattgtaaaaagtattttcagaaaagtaagggttaatggacatgttgaaaacataataaagtctttatgatggtagaaaacgccaataggaattgttttaatatcctttggcgtttttgttttgggaaaataaagcttgaattttatggatagtatctgttaaataaaaatattaccattaaaaattacaaagattatggcattatgttaatggtaagcaaattatgaaataactcaatataattaaataagttgatttacatttatgatctttcaaatgaaattcataataattgctgatgaaatatgtaaaaaaataaaatatgtgatataataatatatagaaaaacgtaaattaatttcataacatttagttttcgcttttctataaaatagaataaaccaattatatataaaactaataggttaatcatggtaaaggtaaatctgtaaatttataaaagaatagttatatgggggggattaatgataatcttgtaaggttcgtttataagtataaaattaagatgaaaagggaaagaagtgccatgaatattgaatatatgaatcaaaaagttgagttttcactggttcgcaaggaaagaaaaagtataaaaatttctgttaatagagactttacgatagaggtaattgctccatttaatgtagcagaagaggaaataaaaaatgtagtgtacaagaaaatgaagtggataataaaacaaatgaagagaatggagaatattattgatataaatgaagagataaaatattcagacggtgatgcattttatatttttgggactccttatagacttatagtaaaaaagggtataaaaaataaaatgaggatttttggagaaaatgtatacatgtatataaaagaaaaagataattatgagtacaaaaaaaattatgctgaaaaatggtataaaaaaatagcagcaattgaattagagtatttatataacgaaaaatataagatatttgatgagatatatgatgaaaaacctaaattatgtatcagaaagatgaaatcaaaatggggaagctatagcccagctgataataaggtggttttaaatacacaactcgtaaaaattcctaaaacctgcatagaatatgttataatccatgagctctgtcacgtgaaatttagaaatcacaggaaggaattttataattacgtaaacaacttcatgcctgattggaagcttaaaaaagaatcactagataggtatgttaatgtttaaatgaacaaaacatagtgaaagctgataactaaaaagcttatcaaaacttaattctatattatgaataagtcttgataagctttatgttttataattaattttgtggatttcctgataaatttagttttccgtttagagaaagataatcaaaaatttgctgataaatttgttttacaactggagctgcagtatcagaagcataatagcttccattgctaggttcatcaacggaaacaagtaatgtaacctgaggatcataagatggtgccatacctgcaaaagatgacatatactttccagctgaatatccgcctgtttttggatcagccttttgagctgttcctgttttacctgcaatgtggtagccaggaatgtcagcgttcttaccaacaccatcattatcactaactactctttctagatagcccctaagcattgtagttatattaggatctaatatgtttctttttccgtagttggagtatttgctatcagtaacagcctgtccatttttattttcagttatttctttcattacatgaggtcttatccaagttccaccatttgctatggagttaagagcagccatatactgtacagatgtaacggaaataccttgtccaaaggctatgtttgataaatctactaaatttactttatcagtgtctcttacaattccagttgcttcgccaggtaaatcgatgccagttttttgaccaaatccaaataggtgtatgtatttaagcagattgtcctttccaattctttgtccgagttgcataaaaccaacattacaggaatgctttaagatatcaacaaagttttcatatccatgtccagataactgccagcagtgaatgatggttccattaacacttaaacttccgttacaatcaaaatccatagcattggtgtcttttactgttccagtagcaagaccagtataagcagttactaccttaaagatagaaccgggctcaaaggtttgttgaacagcatttgcttgaaaaagatttgcaacatcagtagatactccgtcttgttttgcataaggagtatttgggttataatcaggcttatttaccattgctaaaatttcaccagtttttggatccattactgttatattaacagctttagctttattatcggtcaatgcttgctgagctgcctgttccgctattaactgaatgttcttgtctattgtaagtactacgttttttccatccttaggtgctacgtatttataggttccataaggaagttgttttcttgtaacatcagtttcaacacttttatagcctggtattcctgctaaagttttgttgtaggataattctacgccagaagcaccacttccgtctgatctagtatatccaagtacacttgaaagaaagttattgtttggatattcacgaatagaatcctcagaggaaataaagccagttatatttaaggcttttatattgtccacttttgttttgctaatttgtctagcaagatttacaaatcttagtggtaccccatctggtgattttgccgaaagtgttgaatatattttgtcagaagatgtacctaaaatttttgataatttatcggaaagagtttttaatgtcattttttcaaattttagagattcacgtagagtattcatatcaacatccactctatagtcacttatgcttgtagcaagtttgtttccattcctatctaatatgtctccgcgcttaggataaagtgtaattttgcttactctttgatttaaaacttttgctttatatgtatcagaatgcacaaacattataaaaaaaagtctaaaaataagtgcggaaaaaactatagaaaagataaaaaggaccgttaataatttttttcctaaaacgagtcttgggttttttctcttttttttcaattagtattctcccttcgttctaaataaaacgactaaaaatatatcttaaattatagcatatttaatttttaaaataaattacttaaaaatactaatagtttgtgttaaaatgatattgttgtatttgcatatttatgaacaaaaaggaagtggtactttgaatccggttgcatttacgttatttggacttgaaataagatggtatggaattcttattgctacaggagtaattttaggactcttcatggcatattcaaacagtaaattacgagaaattgagtatgattctgtattagatattattttgatttctcttcctataggtataataggtgcgagactttactacgttattttccaatttaagagttataatggaaacataattgatatgataaatataagaaatggcggacttgccattcacggcgggcttatatttggatgcttagctgcttatatttattcaagatataaaaagttaagttttttaaagcttatggatattgcagcgccttctataattttagctcaagccctaggaagatgggggaatttttttaatggcgaggcccatggaggaccagttacatacagttttatagagaaatttcctaaatttattcaaaagggcatgactatagatggtatgtattataatccaacttttctgtatgaatctacatgggattttgttacatttataatattgatgcttttaattagaaagtgtaagaataagggagttgtattttttggatatgtaggattgtattcccttggtagattttttatcgaaggaatgagaacggacagtctaatgcttggccctataagggtagctcaattggttagtattttaggaatgctcatttcattgggatttattacattttcatatgtgaaaacaaaaagaatttcaaaataataattgttattattgaagaaagaatatataatagtaagtataaaaatacccttttatagagtgaaagaaattagataatataaatatagctctataaaaatcaatcccttacaaagattaaagaagcaggtgtgagctgcttctttaatttttttttgaagctttaaaaaaatcaatcccaatatataggtctatagtaaagttttcgtaaacttatttaaagaatttatagttttaaataaaatagaattatgttataataactcggataaaacagtattcttttgaaactgtatttcaggtagaattttcacaggaaagttcgaattatatccttaatggaataagaacggaggaaaaaaatgagtaataaaaacatgtttaaaacaagacagttaactgttatcggattactttcagctatttctattgttttagggttaactggatatggatttataccattgcctatagctaaagcaaccattatgcatattcctgtaattataggagctatacttgaaggaccaatagttggagtggctataggacttatatttggagtgtttagtataatacaaaatataatgtctccaaatttattgtcttttgcatacatgaatcctttggtttcagttttgcctagagttttaataggggtaacttcgtattatgcgtatacactaataaaggcaaagaaccagtctattaaaataggaattagtgcagtggttggaaccttaactaatacctttggggtacttaccatgatttatgtattatatgcagctagatatgcaactgcaaaacatataagtgctaaggctgcagctgcaactatttatggagtagcagttacaaacggtacttgtgaggctattatatctgtattaataactattcctgtagttttagctgttaaaaaaattataaagagataatctaaaggaagtgtttatagtaatttttagaagcacttccttttttgaatatttaaagtaatgagaaaatttaaattatactagtagctcatattaaacagggatgttccgttatcattatttcttggctcgtagccaccgttccaaattatgaagtaacttgctttggggtaatttaacttgatagcatctgaccatcttttataatcaaatttctttattaagcgatttttattgtccacataatctccgccaacatttgggccaagctctggaaatccaaatggtttatcaattccaggataagtgactccgttgtaagttccgcctgtaagctctgcataggctctttttacgtatgtgtctgttgaagggttatcgctataagcatccataccaaccatgtccacataatcgtcaccaggataatataatgctgcattctttccgctattaggtgcgtaacaaaattttaaccaagttaatccgcggcatccagaatttttactaaccaaataatcatgtagatttatccaaagttgtttatactgagacacgtctttatctccccaccaaaaccagtttccgttaacctcatggaatgggcggaagtaaactgttccaacatgtccgtagtattcaagtccgtcaccaacctttgatacaattgccttgtaattctgaaggaaccaagggctagaagaattgatatcttgaatttttgtattagctaaagttgcaaaatcctgaggagatatagaaccattactagttccacctgtaggacaaggcatatgagctgatattatgacgttttttattaaatgagcataaggtcctttgtattgcttgattaatgggatatttggcttttgaagatcacgtatagttgaggcactatcccaacttatggaagatgagtcgttattcccgttccaattgcaaaggtcataagatataatatctaatcgattggaatagccatcggtgtaggctatagatgtgtcaatatttctatcccatccaagaaaaacaccagctttgcatgttgaaaaaaatgcggaaaccttagttggatttgctgcagatataatgtatagtactgcaaaaatagataaaaatagtttttttggattttttaatgtcatttttgtcaccctcctgatttaaataataaatgctttatgtcaaatatagattttatgctaaataaatttattattataaatatagacgtccattagcagtcaattatgtacactgtgttttgtaagtatataatagcactttataaaaacgtttacaatagtattttccaattttttttgaggttttttatatttgcttaaaatatttattaaagtttattggatataagtgtaataagtatttgcaataatatagtatatttcactatttgctataaataaaaaggtttttttgacgatatattgatgttaatataaattttaatacatttatgtagaaattacaatatattttttgaaaattaaaaaaataatataaagatgtagcatttgaaagaattaagtactattaataaaaaaagagaaattgttgtaaaattaagttgattttcaaaatatttctaacatattttgaattaggtgaggaagtttctgttgccaataatttaacacttggtttcccgggtttattaggcaatatattatgaatagtattatgacccaatacaaaataatgacttaggcttagttaactattcaccattattgtaataaaaaaacatttggggtaaaatacaggtgaaggaggcaaaataatgagtaatagtgaactatattatgaggaactgaccgacctttccgttcggattgcgctaggaattaaaaataggacggagccccttgatgaattgaatcaggcaatgactcaattaagccaaactaatgccataaaaggcaacgcggctaatgcaatgaaagcctatattagcgaagtacatatgaccttgattcaaacccttgagctgatccttaacaattatgaaatggcacttggtaagtatgttaaaggttatttagaagtggatagtgatgagagtttcaagctcattaaagaagattttgatgcccataagcataatctaagctcacaccaatctgattttacttctattggcaataaattaaaagctatttcagatgaagcagaggatattatacccctaagaggagcaggcagcaaacgcctcttcaatgttgctaaagatatgggcaccatgaaagaaatagtaagcaatctcaataataaatggaacgattacgaacaggcagacccaggcttcaatcaagttcaagatttaattgcacagacaacatcgcttttgaagagtacgctttcggttccacgtggctattcttatagtccaggaagctttagcaagcttataagtaaggattttgtgaatgcttttgaggttaatgcaaattatgcacaaaatgccgataatcagaaagcttttaaggctaattgggatagaattagtaagaactatactactgaccaaaatcgaatggctgaagaagcaaaaaaggaagctcaaaaagagggacttattggactaatttgggacgagcttcaaattgcaggtggtaccgttattacagtgataggactaggtttaacgccattcacaggtggattatccattggtttagttgttttgggcggtagtatggtggttggaggagttaatagtgctataaatcatacctcaatggccataactggcaagggttacaatctagtaggaaacttgacaaatggggcgttacaatggtataacaaaaacattggtgagcctttagtgaaaacaggaaatcccattgcaaagtttgtggctggttttggcagtggtgctattgaattggctggaggaatgggtcagtttagtgtatatgacacaggaaaaacagtacatactttatggacaaatcctcaagcaagagcacaagttggtaaaagcattggaaattggtggaaccagattcgcagtggaaatgcatatgttataggacaaacagctgcggtggctgcaagtgtacttgtggcaccagaagatataggtgctgcggctggtgatgcaagcaaggcggaaagtttacttggtaaagtaggtacattctcaaaatccatcgctgtttcaagtgtagaaaatgctaagaacatagctactttaccatggagaaccgttgataaccttggtagtaaggttgcagatttgcgtacagtacttaatgaaggcaagggtgctataggtgatttaacaaaatccgttgttgtttcaagtgcaaaaaatgctaagagtgtattgactaaagtaaaaggaacagtaagtgactttgggactgcttcagctgaatttgcaaaagcttttggaaaaacttacgtggaggaaagcggtaagtatgcaaacacttgtttttctgcgactggtgcagcgggagctggtgcaaaagccgcttataaagcaactattgcaggagcgaaagaagctaaaagtgctttcagagtgggtaaagctggagaaaatggttttggtgatatggcggctgaatctaaaagattaataccaggtactcctggggtagttacaggtggaagttctacaaaacttggtaaaaacatgtttgaggaaatgggattacctcgatcaacaaaacgcacgccctatcaggctcagcatattattcctaaggattttaaagagcatcctattatacaaaagattggtatggatatggatcatgcttcaaatggatatttccttcgtcgacctgatgaatctatcagcccaatgtctcgacacgaaggataccatgcagtttatagtgattttgttgagagacaattaaatgctatggatatcaatcagagtattaatatattagagaaacaagtttatgatttgcaacaaaagttaagaaaacttcaagataaaggtttaccactatatatgaaagatgattacttggaaaaagagttgagtaagattaagaaaaaaggctttgatgcatataagcaggacagagttattaacaagaataaagtcaagccaatctgggataggggcggaggcgcaacaatagaactatgggaaaggtggtttaataaactatgaaatatggtgcatactccgatctaattaaggaagttatcgattttagtaacacaatggatagccataaaaaaggtagcatccctaaggatatttttgttataaacgaatttgaaaagatagaggattttgcatttgaaaaattatatggtgaggatgaatatacttggtcggatattaggcaattagaaatgagtaaggttaaaggaaaactttacaggttaagagatgatgaaaaacctaaggaattagatttgcttttggacattatatcagaggggttaagaaggcatataacagactcctatagtaaatttttcgaaagcgttgtagttgatttgaaaaattgtgctgttaatcgatctgtaaatggaagagctataaacttttatgaaaaaatgtttaaaatctaccaaacaggagggttcccttgtggttgggatggagaatatcctgaaggtaggatagttgcttactatccaaaagaagttgatttataatgtattaagttctaactaaaagaaaaactaagtatatattatatataactatgataagagtcaatgtttctaattaagaaacattgaccctttttccatgtaaagagattgaatggagtaaggcttatgtggaaattaattgaagatttcaagatgagcctaatagaggttgggaaaagtcctaaaacaatagaagctatgtctgtgacattaaggattttaaagagtttctagtttgactttttactttcctatcatgtataatgcttaaattacaagcttcatccatattttgtaaaagtttgtggctggttttggcaatggggctattcaattggcaggaggaatgggtcagtttagtgtatatgacacaggaaaagcagagcatactttatggacaaatcctgaagcaagagcacaattgatggcacaaatgggaaattggtggaatcagattcgcagtggaaatgcatatgtgatgggacaaacagctgcggtggctgcaagtgtacttgtggcaccggaagatataggtgctacagctagtgatgcaggcaaggcggaaagcttacttggtaaagtaggtacattctcaaaatccatcgctatttcaagtgcagaaaatgcgaagagtgtaattaatttaccaggaagggcgcttgatgatgttaaaaaagcagcaggatttgtaaatggaaagcttttaccagcgtcaggagaagcggtaaaaagttttggcaaggtattaaaaaatacaggcaaagatttaaaaggattaactcgtcaagtagaagctgaaatgcccggtgtgggtcgagttagtgtaggatctaatatagagtttagtgaagtagttaatgattttaaaaatggagttggaaatattaaggataactttgtgaaggccgttaagagtggaaatggagtggagtctaaaactgaaattaaattaggtaaagcagatttagatgtatatagagctcaaattggagttccagagaggaatacagtttccgtaggaaaaactgatgtaaaaggattagaaggtaagaaatttaatggagcatcaccagaagttagaaaagaaggaggattacaagggttagatgacatatttccaaatcgtgggataacagctccatatgataaaagtataccaggtcataaacaatttatggaacatgcagaagaaggctccattgctgaatttgaggatgctattgaaaaagcgggactaaaaccagaagatgttaaaggaacattctatatccaccaatctaatccaagaggtgtttgtgataaatgtactttaggtctgtttaaacctgatatttacgggagaaagggtatatttaagcaattaactgataagtacccaaatttaaaaataaaggttacaacacaaatggattattctatagaatttcctagaggcactttgtcatttgaagtgaaaaatggtgaagtgttaaacgctgtacaagtaagaaaaaatccaaaaaataaatttcaattttcgcattatccagaacaggagtgatatttaatgataaacttcataaaagaaattaatgaatatgcaaaagttactataggattagttattgctgaaaaagtatttagtctaatagataaaaatgattatggatataatcttggtagagaagccttagataatagttggaagtggcttgagggtgaagaaatagatgctgatgaattatgtgattatattggtaatatcgatggtgaagaggacatatcaggaattgcttatattacaaaacaaataaaatataagcatatgtggtatgtactatactatgctatagcatatacatcttggctggcgtatattaatgaagatagctgtccacccgaagagttagataatgttagtgatgatacattaatatatatcattcagaatgcaattaaaactgaattgtttaaaattgaaagtattaatagaataaaagattatttattagaaaattaccctctgagtaatatgtcaaaagaaaaaaatataagtaaaaaagaaatcatgaaaatgttagatgataattaagttagatggtatttgtgaaaatggaaaagctgctgtagcgctaattatgtcagaaattacattaaatagtatagaacaacacaatactgagtataagttttgtagagatgctattgatatgtgttgggaatggttggaaggtggtaatgttaataaatatgaaatatgtagtttgattgctaatgataataaatgcttagctgatataaccagtaatactgaggatgataaattaggaaataaatatggtacaattatgatttcggtttcatatgtagcatggcaagcatataacaaggagaataattaccattatccacaatatttagaaataattgatgatgagtatttagtagaattaattaaagatttgattgaaatagacaaatttattacagaagaaatataaaatttattttaaataattttaaagaaaagtatccggataatgtgaatgataaattctgtagaataagtaaagctaaaatcttagataatatagttaagagaatgaaatagtagtatactattttgcaaatagatttctactgcaaaattaagaagtatctagatacataaactaatagaattaataaatgctataaaaattgatggaatattatatataaatgaatttataattataataatgaagtgaaaagatgaaatgaatcagcttaaattaagtaggctggttcattttttagtagttatcatatgttataatacattcatcctcaagcaggagcacaagttggtaaaagcatcggaaattggtggaaccagattcgtagtggaaatgcatatgtgataggacaaacagctgcggtggctgcaagtgtacttgtggcaccggaagatataggtgctgcggctggtgatgcaagcaaggcggaaagtttagttggtaaaataggtacattctcgaaatccatcgctgtttcaagtgtagaaaatgctaagaatatagctactttaccatggagaaccgttgataacattggtagtaaagttgcagatttgcgtacagtatttagtgaaggtaagggtgctataggtgatttaacaaaatctgttgttgtttcaagtgcaaaaaatgctaagagtgtaattaatttaccaggaagggcgcttgatgatgttaaaaaagcagcaggatttgtaaatggaaagcttttaccagcatcaggagaagcggtaaaaagttttggtaaggtattaaaaaatacaggaaaagatttaaaaggattaacgcgtcaagtagaggctgaaatgcccggtgtaggtcgagttagtgtaggacctaatatagagtttagtgaagttgggaataatttcaaaaatggagttagtgatgttaaggataactttgtaaaggcagttaagagtggagatgctaggataactataacaaatatggaccaggcaaatgaatggggaagtcaatattatgataattggctaaagtctttaaatgatagtgagagaaatgctatcaggcaatatactgggaatgactataaaaagattaacaattatttaagaggagttaatgattctttagatggaatagatcctaaaataattgaagatataaagagtggacttaagaaagcaagtgttccacatgatatgaaagtatacagaggaacagatttgaatcctctacgaaacttgattgatgttggtaaagatggtagtttggattttagttccttggttggaaaaacatttaaagatgatggatttatgagtactgctcttgtcaaagaatcatcttttgattatatgaatgtctcatgggaaataaatgtgccgaaaggtaccgaagcagcgtatgtcagtaaaattagctattttcctgatgaggcagaattacttttaaatcatggacaagaaatgataataaaagaagccactgtaggtagtgatggaaaattgaatattgttttagatttgaatttaaagaggtaggtgaatattatgtcaggtgtaagaatgattgataggtgggaagaggataataaaatgtttcttcgcctatatataaaagagcgagttcttccaactatatatggtagtattttaggggacttagttggagttccggtggagtttaaaaaaagaggatctttttttgtggaagatataattggatatggtacctataatcagccagctggaacttggtctgatgatacatcattaactttatgtttaatagaaaatatagttgaagaaggtactatcaaaagtttgatggagaagtttgttaattatcaagataaaggctatatgaccccatatggacagatgtttgatataggtggagctacagctcaagctataggaagatttaaggctggttgtttaccccaaaattgtggaggacaatctgaatatgataatggtaatggagctattatgagaatatctccattagcttttttatttgataatgagtttgattttgttaaaaaggcagaagttattaaacaatatacggagattactcatgctcatccacgagctatagtaggttcaattatttatattgagctattattgagactataccacaataatacattagaaaaatcaattaaagatatattggatctttttgaggaaaattttcctaagaatcatatatatatggacgaatttaaatattataagagaatttttgatagcaatttttttaatgttccagaagaacaaatattatcagatggatatgtggtgcatacattggaagctgctatttggtgtgtagggaatacaaaaaactttaaagaagcaattttaaaagctgttaatttagggggagatacagatactgttggagtaattacaggtgctattgctggaatgtattataagatggatgagattcctcaagattggcttaacaaaatagcaaaaaaacaggatattgatgaattgataaataaattttataaatactgtgcagataaagctgttattgaaaagtacggaagtttgtagtagaggaggtagttattctgtctagttgagaaaatcataatgtgattaatatgatcggaggtgaagctggcagaataaagtatagattatagcaaaaggcataatgcataatgattataatgaaacaagagcaataaaagtaagaattaagtattaaatatattgcagtactggggaaggttaacgcttataaaaatgtgttagccttttttcgtttaaaacgagcaaccaattaaaagctatttcagatgaagcggaggatattatatctctaagtggagcaggcagcaaacgtctctttaatgttgctaaagatatgggcaccatgaaagaaatagtaagcaatctcaataataaatggaatgattacgaacagtcagacccaggattcaatcaagttcaagatttaattgcacagacaacatctctcttgaagagtacgctttcggttccacgtggttattcttatagtccaggaagctttagtaagcttataagtaaggattttgtgaatgcttttgaggttaatgccaagtatgtacaagataatcagaaagactttagcgctaattgggatagaattagtaagaactatggtactgaccagaaacgaatggctgatgctagacagaaggaagcgaatcagcataaaggtgtttggaaagttatttggagttggtgcagtggtaataggagcagttgcaatttttgcgacagctggtttgagtgctggagcctatggggtatccaatgttgttgagggtggccaaatcatggttactggtgcagataaagctttcaatccgctgagagatactctttttcaaggaaatcaaagtgcttatgatacctttggaaatgtggcagtatttgtggtaggttcagtgattgcagttggagctgctttgaaagcaggtcaagcagtatctggagcagtcatagcaggtgttgggaaaacagctgtaacaacagccgttggtgtaggaactaactttgtggttgcacctatagcaaaaagtctcgcgaaatctgcgggtattgactcaatctgggcgaatgacatcggtattgggactggttttgctacatcagtatttacagctggtaaggtatataaagcatgtggtactggggccgatgaagctaaaattatggaaaatttagaataaactggggagttaagtgaagctgaagaattagataatatactaaaagtgtccagggaaaatcattatgttaaagagattaaatcaaaaacatctattgagggtataagaaacagtgaacttgcatcattcgaagaaaattttagtaaggcattagatgatgaaggaatgacaaagggtgaatatataaacataactcatacaaatatgaaagatttatcggaagatacgattagaaaaattgataggattaatcaatctgttgaaatgccaaataatgatacgttgatgtcaaaagttattcttgaaaatgcatataaaaactgtataaataatggagagtttagtgatacagttggaaattgtattactagggctcaagatatgcaagattgttattcatatgatgattattataaaaagcttggtttgaattatattaattgggatggaaccgtaagtgtatacactaatcctgatacacaagcattatacattgaaagatttacatcagaagatacagaggattatgttgtacatagttatggcggtactatagatgaagatgttaagatggcacaaaatgttttagggttagatgctagaagtacatttaaaatggatagtccgtatttaggtacaggtgtaactaaggatatagatggtggaattggtaaattagagtttatgaccaaaaaagaaatttctgtgaagtacatgatggagcagctatttataaacttgaaagaggtagtagtaaagaaatattagtagctgtaagaaataaaggtaagtggtatgaaattattgattaaggagagtaaaacatgggaaaattaacaggttattatgcaatatataataataaagaatatgaatgtaatagacacaaagataaagtagaattatatagtgatatttatgaaaatggatttgctaaatcgccatttggtatatactatttagaacttaaaaagacagatgtagaaagaatttacagaagatcgttggtttgcaaatataaaggtgatgtatttgctgttaagaaaaaagataaagggcgtgtgttgttaatgagcggaccaaggtcgtatctattatcagatttgggttttacaagaacagattatgatagttttgaaaaatggatagatataagtgaagccgagaatatttattgggaagaagaggatttttgaggtaatggagttaaggataaattgagtattgtggttgtaggaaaaagcaatatattcaatattaaagtacaccataaaaaatagatagatttagcaccgatattaaggtatattgttaactgactacaaaaataaatattaactagcttttttaataatagttatcaataaatatagcaaattcagcagaaacttcttttcgtggctgaaataagcaactagtaaagctccagtagatgctgtaatggtgtctgttggagttctttttaaggttgaacttggacataataagatcataaattaggcatactttggacacgaaaaatctatagatgctcatgatgaaattgttggtatataggagatttaggcttattaaaatagaatacgagaaaatagtttatgacattatgcgtattgtaagaatatatataaaataaaaatattaatttgaaaggtattaggataatattaggtgaaaaattaaatataagctgtttactcaagttatgtataattaaaaaaccaggagctttaaatacaataggaaaaaacagacgagattgaaataatataaaaatagaagagttgataaaaagtatgaatgagacttacaaagaatatgatgatgtttggtcatagttcaatagctttagtcacaagaagttatggtggaacaggacaaattaatacaccaattaaagtaaagtcgttagaagacgtaggcatcttaagaaacatatggggatggtaagtaatgaaacaagatgaatatatgaaaaaggttaatcaattaggaataaatttagaaagattaaatattgtagttggaagaaaaacaaatatacctaattctatagggtgttactttgaagatgaaaattggattttgtatggtgtagatgaaagacaaaacttttcaattgttgaaaatggtaatgaagatagaatctttaaatttttatacatgataacaatgggaaaagtggcaaaataaaattatggatgggattacaaagaactacttaatagcagtaattttgataaaaaattattaaagaatatacttcataattgtaataatgcagtgaaaagatgaaatgaagcggctgaatttaagtaagctgcttcattattttttagtaactcctcaagtataagcgtttataaaggatttcctagataattagaacaggcatttgtgcagagagagataccgtaaagtgaatcaacgaaagccgtctagaggtagttcagggaagaaaggtaggcaatttgtacttccacaaagaattgaagattctatttcaaattctacgccggaatttaaactacaacttgctaaggagctaggattacctaaagatgtttttgctaatggaatagtgagagttgaagttccattggatggggcattgatttgcatatagtaaaaggaattgaagatggatgtaattatcaatggattccaggaggaaaaacattaggtggaacaacgggaaggcataattagacaaataaagaaggacaatgacagggaattatataatataattattaataatgtaaaaaaataaatttaaggtagaggagattataagtagatgaatgagaaattaaacagagaaggtttattacttgcgataaaaagaaatgaacaggatgatttcttagtaggaagaggagtgtattcttttggatttaatccatataagccaggaagttctatgttagatttagataatgcaatggcagaaatatatgaatattatattgatgaacctgaaaaagggtgaatttaacattagaggatacattactagattggttaacatggaaatcaggtattggagtatttgcagtattttcagttcttagctatcaattaaaaatggaattaaataataaatcaccatttaagataaataaagataaaataaaaaaacgtaaggaatatgaaggggaatccttaaaagaaggactatgggaagtaatgcagattgaaaacaaaattaatattaagaattatgaaatagaaattctataagtttatggatgatgtctaattataagagaaaatataggacaaaattatggagattacaccattcatttttgggaaaggtggtttaataaataatgcttaagcttaataatagtttggttaaggaaagtctaagtttagtagataatattaaactatttactaataaacagaaggtggtagaagaaatagtagaatattgtgattttgaaaaatgcaaagaatttgcatatgactatgatgaatacttgatggacgatgaatattatacttggcaggatataaaagatttgcaaatgtccagttttaatgaagaaatatataaatatgaaaattataagactataaatgaggagctaaggaaaataggtataaaaaatgtaagtaaaatagcattaagtgatgaatgtaaggaagtatgggatgatgtatataacgatttaatgaactgcataaaagttagagcaatacttggaaaaaagaattatttctttgaaaaaatttttcaaatctatttatctggaggatggccatgcggatgggaaggtaacttcccaaatggaaaagtaaaggtgttttattgtaaataagtacaaaaatacagctcaattataaaatgaataacaaggtgcaatgactaacatttaaactggtatgttaacattaaagtacatgattatgaaggaaaactaaatgaatatacaacaggatttgatacttttaatgattatgagattgaaattcgtaataaatccattcaatacaaggaaatattaaatatcatgaaatttattgttgttaatgttatattaaggtaggataaagaatagggatattatcccgattctgttgaatggtaatggagatgaagatatgaagatatagtgaaatagtttgatagtgaaattgtcaagaaacaagcattagaaataatattttaatttggaggtgcaaaatatagggaactttattgaagaagacttaagagatttaccgcaggaatggattgaataattaaatcaaatgcctaggatcaaagaacaaattgttgaagatactatagaaatagcatgggacaatacggaattgtatagtgaagtaaagtttaacaatcccaaaggaatatagtatataccatttgaattatttcgaaacatagttgatagttttatagaagatttcatgctagaagtatccgcaagagaagaaggaaagtaataaaaaaatttaaggaagtaaattaaaggagttatcaaatgaaatttaatttaattaatgttattaaaaatattgctaaatctgtcatattaggaattgttgtatcatacatatttctattagttttttctaattttataaatagtggtgatgccgttggtgctataacttgtattgctgtaatttcggttcaattcttttgtacttttattatactagatgcagtaaaaagcaataaaatgcagtaaaaagccattgctataaatcggcaagtgattttttatatttgtggtatcgaatttactaatgacaaatgaaaacaaatagggtggaagaatatatatgtattaaatatgatgagtatgagttattagagttgttttgcaatgaacctgttagcattggagaggtagaagcaggtgaacttatttattctttaaaagatgataagggatttgaaatagttatgttcatggatgtatataggaaaatttgtgaagtaacaataacttatcaagaattaatagtttttacttgtaaaattgaagatgtagaaacccttagcaaagtagatgattatatggtaataaatagtagaatgaaaagcattttaaaagttaagtttaaaaagcaaatatgggttgaattgctatagttggacacggtattggaatggtaggttcttcctttttacatgttagtagtgattttgttaacgggattccaactcaaatactataaaagaaaggtaataacttatgattataaatatggacatgctagataagagtggaatagattacgattggagaacattatacgttggtataagcattaatctagtaaagtgtgatgaattaacaacttatgcgcttaaaatgatgaatgatgataaatacgaggatgatgaatttataaatgaattagcatgggggattgaagataatttaaaaggtgaaatactgacaaaaatgctttttaaatttaaaattgatatgctagttccacaaagtgcaagttgggagttagaaataagaaaattaaggtatggaatattaaattatctaagaagtacaataaaagatgataatgaacttcttagaaaggttgaagaggtatatgcagattttaattatccacaagatatggaacaatttatagcatatatgccagctaagaataattcagttactcattctattgaagataataataaacgtatgataaataacctagataaatttctaatagtagaaaagaaagaagtaaattcattttagttttagtcattacataattctcccacatgtacatagcaataatataaagataagagaattcttttggatagtcggatttctccattcgatatgctatgttaaattttgatagaaaatagttagaacgtcttaaatgccaaggagaagttactactattgctgatgaccaatgtttattctccattatctttattgaattttgtatattttgataggtgtttcttgatttatcctctttaatcaaacaaccatttggaatacctaatgattttgcgaaattagccataacatccgattcaatatatttattatatactcctccaccagaacatataatcttattagcgtatcctttattaaataatttaactgcttttataactcgttctctcattataggagagggctttccgttctgcaaagcaggaaatcctaaaataattatcacatcaaaactatctcttctcaattttgttataggagacttataaaataaaagtggatataagttgattaatataagaattatgataataaaaataaaaacacttaatgacatatattttaataaaacaataaaactattaacatccattttcttttgaactccattcattgtttgaaattattaatgcatactgtaggatgctttaagttatttaaaacatcctacagataaatttattgaacagacttttgtttattcttaaatttattccaaataataaaagccaaacctaagagtagaagcagtgttcctataataagaagtacagtgctatctatcatagaacctgttttaggaagcgttttaatagaagtcgtattttcttgacattcagagttaggagacaattgacaatttggagcatcacttgttgtagtagacgatggttgtgctcctgtagttgcttcacctggtatgtttgaacctgtagatgtagtgctattatttgttggcaaaggatttacgattggtgtaggagcaacgggaacagtgcttgtatccgaaacaggtgtagtatataacttccaattatttgagttttcaggggatatagtctgattgtttttgatataactttgcattaagcttctaacctgaccatcatctccaagagctttggcggagctgtaggttacaatacttggatcggtattgcttataccagcagctttcatgaaaccaccacctccattgtatctgtagtcatttattgctacagtaaagacatcagaatctttaattggtactccgttaatcttgagattttttattctgtctccagaggcaattcttcctgttgaaggatcaattgtgcaagcaggctgcgttaagtctatatcgtaggtagcaccatatagctgatctaaattatagtcaggaacatttaaggcagggtcttttgcaattgaatcattaggacttgaaacctgtttataatatcttacggagtattcaagccaatcttttagctgttttccagtcatttttatgccatataaataattctcataaacatatacagacataatatcttttatagttacatcaccttttggaatgtaagcagaagaacttaaaggagctgctattgaaagttgagcattagctgcatccttttgcactttgtttattaattccattatggcagtaggttgagttgtttggttactgcctgtaaattctcccgtggaggttcctagtttagttgatatatagtccaaggttttattttgatagggctgaattatattaactatattagggtcttcgggaatcgaatctgtcatcttaacgttttgggtatttatagttgaggcatttccgctgttatctagggttatatctatttgtgatacaaaagttccccatttgtttggttcaacaacaggtacagtttttccatttggattttttaagcttgtatcattaacagtaacatgagcgtgacctgcaactatggcatcaatacctgaaacatttgtagctattgctttaatttgattttctggaattgtatcagctgcaccttcttcaccactatgggcagctactataactacatttgctcctgccgctttcattctaggaacccaaagtttagcttcgtcaactagatcattaaaatgaagccctgcatagtgagaagggtcttcccaatcgggtatgcatttagttgtaagacctaatattcccacatttactgttttaccatttatgttaaaggtcttaatatagtagggattaacaaagtttgtattgtcactattataagtatttgcggataaaacatttatattttccttacgtgcatcacttataactctgtttaaagttggcaaaccataattgaattcgtggtttccaagtgtccaagtatcgtatttcatagctcccataatcttcataagaggatattcagaagttgtatctatcttatcataatagtacgaaaggggagttccttgaatagtatcgccatcatctataagcattacgttaggttttgaagcacgaacagaattaacatatgaggatactttagctaagccttgagtgtttgttggtgcttttcctgttgcatagtcgtaattgagaacatttccatggatatcagaggttgcaaggatagaaattgtagatggtatttgtgtagctgagtttacaatcctgttatccattgtgtagttaactgtgttatttgcttttacattatccattaaagcatcacgcacaagcttatgagtatcagctaaggttgattttatatcagatttattgaatcttaaaaagccatctccgccagtaagtacgaaatcaggacctgcaagctttaaagtttctgtgtcatttattggagtttcattttctctggttatagaagttattttgtttccgtaggattttgatggatcataagtgaatttaattcctgagacttgaagcccttttccaccaagagtggtattaggatagcttgaatcttgatagtttccaacagcttgttctagaatatcctttagttgagctttgtttagggtaaccgtttctatgtcgttgtcaaaaggcattaaggcatatatgtctccataggtaacatcaccactgcttaaatctgttcttaaaccaccattattagatatccctatatcagcattggcataattttttataacatccgatgcccaattgcctaaagccgattcaccatagggattagaggtttgagttctagttatagtatttttgatattacctaaaacttgatttaatgtgggaccaacagacgccttagcatcatttacaatactagaaatatcaggatcggttgttggattagaagacttgtagccatttgcattatctaaagcaatatagctagaggttgtatttaaaaaatgtacacttccatcagcggctacagtcatctttaaatctgcaaaacctttaccgttgcaatttgcatttatgacaggtatattgttaaccagcttttcttcaatagtgttggtgtgacctccaaatactgcatttacatttgaaagtttgcttactatgttatctagattgtcttcaccttcatgaactacagcaatgattacatctgccttattattatttttaatatcactagcaacactgttaatttcagttgctaagtcagtaaaaattttatctgatacataggaaggcgtaacgatattaggtgtttcatttgttattccacctataaatgctattctaacaccatcttttgttattattttataagggtcgaaaactctactgcctttactgccatctggatttttgttatatagatttgaacatattatgttgtaattagcaccttgcatagttgtatttgttaaagtgtctaagccccaatcaaattcatgatttccaagagtagtaaactgcattccaaggctgtccataaccttttgaactggaacaccttttaaaatgttggatagagcagagccttgataaagatcaccaccgccaaaaacaatggtatcggggttagaagcgctaacagcttttaccctatttccaagaactgaagcaacaggatttgcgggattgcttgtatcttctagtgcaccgtgaaaatcgttgatttcaactaagtcaaaagttttgtcattagaagctgcaaaagatcttagtgggaaatttccaagcaaggtgaaaatcacgaaaaatatcaatagcatccttgctgttagataatttaattttttttgtttagacaaattatatccccccatttggtagttttatattaattttatcacaaaaattatgaaattaattaaattaatgttaaaatttattaatataagtaaaaaatgtttaaggaatattaacatgtggtaattttgactattttcgataggaattacgttttgacgaattacaaaagtataatagagaatggtgaagaatgttggaaattattaatataaacagctgtaagaagaaaaggattgcctttataaaaagggcaatcctaaattgatttggtgaattttatattataaagtattttggatgtcttctgtgactttaatatccttttttaaacataaatcaaagcaaacttttattaggtatacaaaggtggttatgtttaagagtgatataaatactattagcattgaactcgatgaattaacattcatattaagcctgttaaacaagattgtgtgcatattagcgtaatttataaagcttagtaagagagaaatcaagagaagtcttttatctttaaagtatatataagctaaaattgatgctaaaactgctgtaaacatgtatctttcatgcattccaaccgaaaagttaaatacaccaactacttgtattaaggcagctaaggttgaagcgtatttgtttttactttttaaatagaaaaagcctgaaattaaagttattaaaactataaaaagcattccccaagtatgataactgaatataaacattgtgtttgagtcttttactctattggctccaattaaagaataaaaattaaaagcattatttgatgcatatggatattctgaaacctctcttgtataaaggtcaaaaatccaagttatatttccctttgatatggaaaaaggtgcaagtacaattattgtcgttataaaccctgaagctatggatttaaaaatagactttaaatttttattttttatataccagaacaaaactagtggaagaaagatgattccttgtggtttcattaatacagacaaagcaaagaatatagaagacggtactatcttatcctcagatataaagtaaactgcaagtataactaatagtgtaaagaaagaatctgcttgaccccataaggttgaatttattaatattgctggattaaataaataaaatagcgtaagtgcaaagcttgtttcataagaaaaacgctttatagagagtctatacacaaagtaggctgaaaatatatctgcaattatagatggaagttttataagtagcgttgagtaattactcataaatgagctagaagctattttaccaataatagatagaacgtagaggtacacaggaggatagtctacagatccattagtgtatacggctgcaagatttttagcagcggttaaggcccattgtttataaagacctatgtctgtaacatacccagttattaaaagtcccacaataattctaaatagaaatccaattacgagaaaagctgcaagtataaaccctctgttttcagtgcttatttttattttctttttaactatagcaagatatgcacaaataactatagcaaagaagcctaaggagtagattagtacttccgaggaatatttactgctggagttaaactcacctccacccatcattctctgaggttttgatacattgtggttaaagttattaggtggagcggatttagagtttgcattggaattagaagggtgttgtgctggagcacctttcatattgggttgaccgttaagctttcttgaagagctgttaaagcttttgttaaatccaccccccattttaagaaaacctgtatttttttcgctgcttttgtatgtagataaagtgtaaacacatataattgccaagacaagcatgataaacgataaaatgaatttagtccaattcttcttcaaagtttccatagaaaaacctccttaatgataaaatgcagggaaactaatctaaaagcaatttatacatataaggctttaaaagattggagaaatgtataaattgataattagactagtttctttatttatgggtactgtatcatatgaaagttaatatatagatataccactgggggttgtatatctatatattaagcttccgtatatttgaattatatatatgaattgtcgtttcaatatcaaattattgtgtgaaatatatgtgaaaacaaaaaactgtgttgataggtaatatcaacacagtttagaaattatattatttaagtaaagctagccaatattaagttttgtaatttcttcatttagagctttttctacagtaacattctcaagaactaaatctttaatattgttgaagtacataccgtttcttttcattggttctaaaaagctcatcatatcagcataatcttcctttgcattttcatcgaaggatacagatacatttttcatagaaactttttctattttctgttctggaagaccgtacatgaatgcagcacatacatgagcgtttgtacaagttacatcttctacgtatatacttcctatgtaaggggttttatcatcaacgggtaatttttctttactccaaacatattctgtttttccatcgtcatcgcagaagtagaaggagttaattgaaaatggtgttagcaccttgtccatctttatatttttcatgtgaatattatctataatacctttggaacctctgccacgtcttgttttaattctaagacctctatcagtggcattaaagatgcatttttctataaatatagatttaagtccagaagacatttcacttccaagtacaacagctccatgacctgaacgcatattacaatttcttatatttatgttttcagaggaaactggattctttttgcttatatctatttttcccgattttattgctatgcagtcatcgccaactgaaaaagtatctccgagtattaaaacatttttacaagattcgggatctaaagcatcagtatttggggcattgaagggattttctatgcttaagtttataaatttcaaatgatcgctcattaaaggatgaatagtccaagatggagaatttttaattgttacaccctcaactaatatatttttgcaggcattaaggaatagagttcttggtctccaagctattctcttttcttttgccttaaaccaccaagtatcgaaatcagaatttccatcaatggtgccttttcctataatgtttacattttcaacattgatagctgtaattaagcttgcaaagcagtctgcttcatttccttcccaagatccaagataaaaatctctattagtcatagatatatttgccttcaaaattggatagtgttctctttcctttaaacctaaaagtacggagccttcttcaagctctaaggttatgttgcttttaaggaacaaaggaccggttaggtaagtgcccttaggtataataactcttccaaaagcaggacatacttgtatagcagcttgtataaatgctgtattaacatgatttccatctccaacagctccaaaatctaatatgttaacaactgcagattctaatttcgtttttatgcttataacagggcttttagctttgctttcagtatcctctataaagatactgtactctgtacccggtgttaaattgtttagtgtaaatacatttttatctgttgttaaaatcctttcgttgttcatatatacatctgctgtactttctaaataaaaacacttattgttctctatttcaaatgatgcagatgttgaagttgctgtgactaagttaaaattcattattagccatcctccattcttaaaattatattgtcattagtatccaagctcgtcagctattattataatttttatccttccctcaaactttattccgttgtggataattgtggtgaagttacaaattcttttcttacaatcacagtctacacaaaaacccgtctcaacacaaggtgtttcgtgttttattctttttgaattcataggagcaatttcacgaattctttttaatgcagcatctatattttctacaattttatttattccagctacaattataacgtttttaggtccaaaaatcattggagctactctattaccagtacagtcagtattaactagttcaccattttcagttattgcgttagttccagttattaagtaatctgcagttaaagatttgcgatgtatttctactatatcaggatcaaaagggaggttttgatatctgtcaaaaaacttataattgccgtttcttaagacgtcaaccattcccatttggcttaaggtggtagaacctccaatagcaacacttgaaccttcttcaatcattgaaattagtttttctttagcttcttcaagagtttctacgtaagaagctttaaagtgtcttttattaagagtttcagttattttttttgctttgcatacatttttccatttttttatttcatccataagatttacctccaaattattttaagagtaggtgataaatgaaattaaatttcatctataatataaaagcatatagggttttagcaaatatagtacatgtatttgcaaaaaccccatatgaatttaacatactacactgatagagaaccagaagtattctttttatttgagtaagctacgttgttgtttccaaaacatttctcgtatttccaaccagttagtgcttcaacagctgttttagcttcaggagatacctcatttaatgagccaccagctttaattctgtctacttcatctattaataatttgtgattttcttttgtaagcttaaatcttgaagcagcaatccaagttattgtaagaagtacaagagggaatacgattgtaactatagatattccaactattgcactgtgtggctggtgaggcatatgttttgcttttgcgcttgtacttatgaaaccaaaagcgcctaaaccaataccaagtaccattgattctattgatgttgcaagtttaccaaataaaccattgataccattgtatacaccttctcttctctttagagttattgcttcatcaatatcagcaataaagcccatctgataggtaggaatgtagtcaacagcagccttacctacaatattaattattgagaacactacaaataaagttaatgtcaacgaattatgacctgtaaatacaaggtatacataacctaaaagtgatacaaagattattactattcctagtttaaatgttttaggagcaccaattttgtatgcaagtaatatatatgctaataatgcaatacatgaaactaatgaagaaacaccgtttacgtttgatactgcaactgttgttaagcttagtacatatactgcaaagaaggtaagtacaccttgtgcaagttgtttgtaaacactacccaagaaccacataacggagtgaagtctgaaagctttatttctcatacatgaaactaaatctattccaagctttttaaatacttctataagagaaccagcatcatcttcgtatacagctgtttttggatctctctcatacacgttaaagataaagaatagtaaagcaattgtagttataattccccaactaagacctatataccaaaaggatttagtagaggtttttccaaaggaaccaaatataaaacctgttaagaatccagtaatagtatttgctatgttaccacaatattgttttccaccgataagttttgctttttcggcagcatcttgtgtcatttcagctggaagagttgttccaggaacaaaaactaaggtgtaagatacttcataaatcatgttaactacaaagtaatagataaaggatttgcctgatatccataatagagggaaaacaatagctattccgattattccgagagcgataaaaggttttcttctaccaaatctcctaccaagttttgttttaccaaaaccgtcgcttataaagccaagtaccgggttaccaacagcatctataagccgtgctattgcaaatattgatgccgcttttactgaattaatgccacagacactactataaaagaataatagccatgcagacattaagccttgagcgccacttccgagaaagtttatacttgagtagccgagtatattgcttaattttattttctctttcataatttacaccccttaataaagtagatatactttttctaaatttaagatagttttaactgcgtaccacctttaatttctacaatctcatcgtttacagtgatccaagcagattttgctgatggattgtaaacaaaatcactctttgctgaaaatttgagattatcaagtacgtttttgtagtctactatttcgatgtttgttgcataccaaatatcgtccttatttgatatatagctgcagaagttttctataagatgccaattattatctctatcaaattcataactgtgtccccaaacatacatcatgtatagatattgttttttgtatagaaaaacaaattccttagcatgttccatcaagttatggttatgatggcaggtagctttccaagctgtaaaatcagaaggaagatcaaaggaatcagaattgccaactattcttgaatactctataccaagatatttaaggaggtttcttatagaatcattgtacgaaccgttaggataggatagaccgcgtacggggtatccaacaatttcctctaaattttccctgtccataagtatttcttttgttacttgttccataggacatctagcaattgtagggtgagttagagtgtgggcagaaacctcatgtccactatataaggtcttgatttcagccttagttaaacggttataagatccgataagtcctgagtttatgtgaaaggtccccttgataccatatttattaaaaatgctcacaagttttttatcagataactttccatcatcatagctcatggttaagactttaaattttccgtctgggaaacatttaaaaattttattcattttaaaaatctccttaatgaattctctaaatatttaacttaaatattaatgcaatcacattgctaaaggttttaaattatagtaaaagtatatcattaaagtgtttcgtattcgtaagatgcaagtaagaatggccctaagccttttggttcattacttactattggttcacttatataataagcaaagcttccatctcttttgtctttaccaccaagaccggctacatagcaaattttatttaggtttataagtccgtcctttgtttctaagataaattcatttataagtcctttgtaagcttcttttgctgtctctttaagagattcaggtagatatcctagccttactcctttaagtaatgcataaactatcatggaagaaccagaagcttctaagtaatttccttttctttcgccttcatctaaaacttgataccatactttgctggcattatcctgaactttaagtaaagcggttacacaattatttaatatttttattaaggcatttctatccttgtgatttttaggtaaaacttcaattgtatcagctaaggccataacataccagcccatagctcttccccagaagtgaggtgatagtccagtttcactgtttgaccaaggttcagttttagattcatcataagcatgatagagaaggcctgtcttattatcctttaaatttttttcagttattataaactgatgagttatatcatcgaactccttttcttcaccaaattcttttacatatttagcgtaaaaagtagctcccatgtataaaccatctaaccatatttggtgtggataaatatttttatgccaaaaaacgttttccttagttctaggatgattatctatttgttttcttagattgattaaagcttttctatacttttctttgcctgtttccttaaatagagttattagtatttttccgttattaagatgatctatattatattcctctaatttataaccgtttattgttccatcttcatttataaaagtgtccattgttttaatgataaagtctaagtatttcttatcctttgtccattcataaactttagcaattccatctagagtcaatccatattcgtaaccccaatggtcagttaaagttatgtttttggctataatggaatctgccattaatttagaatatttttgcatagtaacaccccttgtaattcttttctttatggtaatgtaatcgtttgaattatagtgttcacgttatcaatattttagtgtttaatatagaataacacttgcacaaatagcaagttgtagtaaaatattacaaaatgtcatataacataataagtttattatagttaataaattattacgttaacgttaacaaagctatagtaacattaatgaagtgcatttgtcaataatttgaatggtaatttttatggtataaaagttaataaaaagagtacacatctataaataaactcatagtatacaaaaaacaataatgatatgatataatttttgtatatatagtatatatggtttatataaaaaaatatatggaacaaagtatgtaatagaataggtaggtgagataccgatttgtaaattttgtaaatcgggtttatatggttagtattaaagatatagcaaggtattgtggagtttcggctatgacagtgtctagagcacttaacaatagtgatgatatagcagaagctacaaaagaaaaaattttaaaggtatgtgaagaattaaagtataagcctaattcagcagctaaaagcttaataactaagaaaacaaatatgattggacttattataccagatattgcaaatcaatattacgcaaatatcagcaaaggtgtaagttcgtacatagaaaagcacggttatggtttaatattatgtaacagtaatagaaaaaagccaaatgaggttaagtatttggattttttaagtgagggcagagtggatgggataattattcttccagtaaagccgagaaaagaagattatgaagatatatcaaggcaaattccaatggttatggcagataactttgctaaggggctagaggttaattttgtaggtattgataactacgctggagctattaaaattataacgcacatggttaatcaagggtataaaaagataggagtaatactgggagataaagattctactgcttctagtgaaagacttaacggctataaaaaagtacttgaggataaaggtatatcatataacgaggatatagttatacacagtaattcaacctttgaagatggtttcaatatagcaagcatacttatagaaaaaggtgtggatagtatttttgcaataaatgatactgtagccatgggagttataaaatattgctatgagaagggaataaagcttccagaggaacttggacttgcaggatacgacaatatagagcaggcagctatgctaacaattccacttacaactgtagatcaagataataaaaagattggcacaatagcggctaaaatgcttgtagatgctattaagggaaatgcaaagaaaactgaaaagattatattagaaccgactcttgttataagaaaatcatgtggtgaatgacttttaatgggtattgactggaaaaacaatacgttgtataatctaagcatattgtgttaacgttaacgaaaaattgtataatatatttttttgtgcttaaaaagatttttataataagctaagttttagatatataggtaatttggatagaaaagatattcgttctattttgtgaaaaagttactaactaaataaggtatgtacatataaatgagtgttaaggaaaaatttcttaaaaatgatacaaaattagttatacaacttaaagagcaggtattgttattagactaaaagaagggaggttgtaataacatgaacttttctatacaggatttttcaatggactttttttcattaaaaggaaaggttgcaatagttacaggtggaaatacaggtctcggacaaggatacgcacttgcacttgctaaggcaggcgctgatttatttatagttactcatggtactaactgggatgaaaccagaaaactcatagaagacgaaggaagaaaagttgagttttataaggcggatttatctaaaaaagaaagtataccaggaatatttgacaaatgcatggagctttacggaagattagatatacttgtcaataatgcaggaaccataagaagagcccctattacagaatatagagatgaagattgggaatatataataaatacgaatttgaattctatttatcatttgagtcagagagcagcaaagattatgataaaacaaggttccggtaagattataaatattgcatctatgctttcttttcaaggtggtaagtttgtacctccatatacagcctcaaagcatggagttgctggtttgactaaagcatttgcaaatgaattagctgacaaaaacattcaaataaatgcaatagctccaggttatattgttactaaaaatactgaagctataagaaatgatgagtcaagaaataatgaaatattatcaaggataccagcagggaaatggggatatccatttgatgtaatgggaacggtagtatttttagcttcaagggcttcggactatattaatggccatattttagcagtagatggtggatggctagttagataaagttaaaataagaacgtacatagatttggtgtgagcagatttatgtacgttctttatttataaaaggatgcgttaatttgtatttatatatagtatagttgtataagtaatggaaatagtagaggaagaatacagtaaagataatgtacaccgtaaattaaatatttaaattagtaacataagttacagaaggttcaaattaaattatttataattggttacataagatttaaatagttaggagtggttttacaatgtatattgataatcttaaaagacaacatacagagatatatagcagcataaagatgctgaagggatttatagataaaaaaatgagtgaagaggactacgcagaaatggctaaaacagttagtgtattagctgggattttaaaagttcatcttcagtcagaggacaaattcctgtatccagagttattgaaaaacaaggatgaggctataagtaatatggcaaaagaatatatagatgatatgggcaatatcggcaagaaatttgaggaatataaaaataagtataatactaaaattaaggtatgtgacaatgttttaagtttaaagaaagatactgaggaagttttaaacttacttgtaaataggctcaataaggaagataaagctctgtatcctttgataaattaagtactataatagttaaatgtaatatgatataatgagctatggcaaaacctagaaatatgagggaataaataaaaaagctaatttcagagaaattcttctgtgttagttttttgttatataagggagaaattaagatgaaaacagtaaatgttcatgggtttgaggcaagctcaaaggaagaatttcaagtaattcaaagcagtttagtgaagagaattaaattaataagtgattttaaagaagaggatataaaactttgtgcaggtgtggatttagcatattggacaaaaggtgagaaacagtatggtgtatgctgcatcattgtgatcgattataatacaggtgagataatagaaaaggcctatgattatggggagatagaagtgccatatatgccgggatttttagcctttagggagcttccactagttatcaaaaccgttaaaaagctaaagaatgagccagatatatttatgtttgatggaaatggatacttacattataatcatatgggaatagctacacacgcatcatttttcttaaataaacctacaataggagttgctaaaagttatttaaaagtagcaggagtagacttcgaaatgcctgaaagttttgagggtgcctttaaagatattgtaataaatgaagaggtatatggaagagtattaagaactaaaaaagatgttaagcctatatttgtatcctgcggaaattacatagacttagaaacatgcacgaaaatatgcagtaagcttataaataatgatagtagattgccaattacagttagattagcggatttagaaacgcataaaagaagaagtgaactatcctaaaactgaggaggagaatatatgtttgattttattggaaatggaagtgcttttaatacagagagaggtaacaatagtgcatttataaagaaaaatagcagtatgatacttgtagattgtggaggtacagtttttcacagaataaagcagcttaatttacttcaggatattaaaaatttatatattataataacacatacacatccggatcacattggaagtctcggggacttgatattctattgttactatatattgaagtttaaaccaactattatttatcccaataaagatattattacagacttttttaatattataggagttggagatgaaatgtatgagcttgttagtgataataaggttaatttaacagctccggagtttggagatttaaatatagaatttatacctgcatctcatgtaggagtaataccagcatatggttttttaattggaatgtctgataacttagtttattacagtggagatggtaacaaattaccagaaaaaaattataaataaaattaagagcggttgtatttccatggcataccaggatacgtgtggtttaaattatgagggaaatgttcatctatccttaaaaaagctttgtgaagcaattccaaaggagtttagaaataaggtgttttgtatgcatcttgatgaaaatataacagaagaagagataaaaaatgagggctttaatgtctcagttttgtataaataaaatttatttatacaaaatataaaatatcctaaaaattaataatatgttgtaaaaaatacataaatatgataacatattattaaaataaaccacaataaattgacaaaatgataaaaggcgaagggagagtgcggattgaaaactaaggctttatttacttttcatttttctgaggatgaaataaaaaatcttgaagaacttgggtttgaaataatcttgagaagagaaaaagacttaaaatatacaaaagagcttgaagatgtagagtttatgtttacctataatccatttaagcatttcgatatagctaagcttaaaaaattaaagtggattcaacttgaaagtgatggttttgaacaaattccaaaggagtatactaaaaataacggaattatagttactaataataaaaatggctatagtgtgcctatttcagagtggatagtttggagcattttatctacctacaaagaggcaaatattttctttcagaataagcaggataaaaaatggaagcttagaacctctcttagagagatttttggagaaactgtaggaatacttggcactggacatatagctattgaaacagcaaaaagacttcaagcttttggggttaatgttttgggacttaatactacaggcagaaaagtagagtatttcaatgaatgttatgctaaggatagggtagaggaaatgattaaagagtgtgatgtagtagtatcacttctacctattacagatgagacacatcactttattaatgaaagaatttttttattgatgaaaaatggagtggtttttgtaaatgcatcaaggggtaaggtagttgaagaagagaaattaataaagtttcttaagaatggtaaaatacgtgctgcagctttggatgttgttgaagaagagcctttaagtaaggatagtcctctttggcaaatgaataatgtgattataactccgcacaattcttggatttcacaaaacatggctaaaagaaagtataagttagtttatgaaaacatgagaagatataaagcaggagaacagcttaaaaatatagtggatttacaaaagggatattaggattaaattttttaaaggcacattgtatacaaatacaaatacagagtttttacatataagatgaaaggataaaaataataaataattatgaagagtatgtatgtttttgagcaaattgttattctatttttaataatgggtattggatattatgctgcaaagtcaaaaataattgatgatgacactacaagccatttatcaaattttatagttagcataactcttccgttaatgatattgacttcttttaacgttgagtattcaagaaaaactgttattactatcataaatcttcttgtattttcagttgcagctttcattatttcaattgtaataggaaaaattatttcatttaaatttgctatggataagagagatatattgatgtttatgagtatattttctaactgtggttttataggatttccggtactaaaagttgtgtatggaaataaaggagtactttatacatctatattcaatctggtatataacgtatttatttggacaattggaatagtgattataaatgataagagagaaaaaattgattataagaaaatattatttaatcataatataatagcggttattgttggagtttttctgatgctcttatctataaaaataccatacgttatgagttcagccttcaatttaatagggtctatgacagcaccgttatctatgatagtaattggttctatactagcaggtgtagattttaatgatatttttaaggattggagcctttattatatagcaattttaagattaattataatacctcttataatttattttgcacttaaaccctttcagattaataaaattgttattggggtaattattatttgtgaagctatgccaggaggaaccctttgtcctatacttgcaaaaagttgcaatagaaattttaagtatgcgtcaaagatagtgcttataacaacaattttatcaatgatgactataccatttatgactttgtttttaaaaatatagaattttatttggagatgatttaaatgagtagaatcagtgaagaaatagagaatttaactgtggagctggtaaaggtgccaagtgtaaatggaacagagggagagggcaatataggaaataaaattttaagttacttaaaggagattgattattttaaggagcatgaggagtatgcatttagaatacctcttaagaatgacaagcttggaagaggtaatgtttttgctttgataagaggagaaaaaggacaatcaaatagaactataattttacatggacacatggatactgttgcagtagatgattatggttcattaaaggactatgcttttgatccagatattcttcaaaaaaagcttaaagaaattgaattgccagaagaagttagagaagatcttgatagtggtgattggatgtttggacgaggagcatcagatatgaaaagtggggatgcagttcatcttgtagtattaaaggaattatctaaaagagttaaggatatctctggcaatatattatttatgtcaaatccagtagaggaaaatgagcataacggaattcgtgaagctcttgacacacttgaaaagttaaaggaaaaatatagtttagaatataccttagcaataaacaatgattatatatgtccaatgtataagggagataatacaaggtatttatatactggaacagttggaaagctgttgcctgctttttattttgtaggtaaggaaactcatgttggacaatgttttgaaggaataaatgcagatgtaattgcttcggaggtaataaatgaaattgatttaaatgtagatttatgtgatgaatacaatggagagtacacacttccgccttcagttctaaagtttaaggatttaaaagaaagctataatgttcaaacgcctttttcatcatttgcatactttaattatacagttcatagtgaatcaccaaaacaagcgtcagaaaaattaaaaaaagcagctaaaagggcttttgagagagtgattaaaaggaatgatgataggtacaaaaaatattgtgaaatgacaaatcaaaagtacgaacctctaaattttcaggcaaaggttataacttatacacagttgtacaccttagctaaagctagattttctggggatttagacaaagaaattaaaagttacgaacaaaggcttgttgataactatgtggatattagggaaatatcacttagagttgtggataaagtttttaatatatggggagagaagaaaccctgcatagtaatgttttttgcaccaccatattgtcctcataatactttaaatgtgaagaatgaaaaggaaaaggaaattatcaataaaataaaagagtgtgctcagcagttaaaagaaaaagaaggtataaatgaagaatttaaagttatgcaattcttccctagcttatcagatagcagctatcttaaaatagatgatgatagtgagggaatagaaagcttaacctctaattttcctgggtgggacagggtatatggcgttcctgttcaaaaaataaaagatcttaatataccagcaataaactacggatgttatggtaaggatgctcataagtggacggaaagagtttataagccatattcttttgaggttcttccaaaattaataatgcttacaatagagaagtttttatagattaaaaaaagaggagaccatgtaagctaattttacatttggtttcctacatatagataggagagaatgaaaatgagcagtttatatgaaagaagtcttaaggttatcccaccggtagcaggaagagctacaaaacttggagtagtaagaggagagggggcatacctttatactgaggatggtagaaaggtcttggattttgctagtggcgttgctgtatgcaacttagggcacaataatccagcggttatcaaggcagcaaaggaacaaatggacaagcttatacatggtggccataatgttgtctactatgaatcatatgtaaaacttgcggaaaaaatagttgaactcacaggtaataaaacaatggtttatttcagtaacagtggtgcggaagccaatgaaggagctataaaattagcaaaatacataactaaaaggcaggctataatatcttttaaaggatcttttcatggaagaactttagctacaacctctataacaggttcaagctctaagtacagaaaaaattatgaaggacttcttccaagcgtatattttgcagaatatccatattgttttagatgcccgtataaacaaaataaagaaagctgcaatatggaatgcattagtcaatttgaagatatgtttaaaaagcttattgagcctgaaagtgttgctgcaattataatggagccagtacaaggagagggaggctatattgttccacctaaaaagttcttaaaagctgttagagaaatttgcgacaagtatggaatatgccttatttttgatgaagttcaatgtggttttggaagaacgggaaaaatctttgcccatgagaactttgaagtagagccagatatttttacttgtgcaaaggcaattgcctcaggttttcctttaagcgcagttataggtaaaaaagaacttatggaaaaatggccagcaggggctcatggtggaacctttggaggaaaccctgtggcttgtgcagcttcacttgcgactataaaggaactagaaagtggagttttagataatgcaaataacatgggaaattacttaaaggaagaacttttaaagcttaaggacaaatatgcttgtataggagatataagaggaattggacttatgataggtatggagttttgcaaagaaaataataatccagatggtgatatagtaacgtttattagagaagttgcagtaaataataatctaatacttttaggttgtggaacagagcataacgtacttagatttatagcaccacttactgtggaaaaaagtgaaatagatatggcaatatccatagttgaaaaaggtattgtagaatatttaaataagtaaggtaaaatgacttgagagaagctttgttatttctctcaagtcattttagtgtatatcaagaaggtaataattgaattcttctgaagaactagctaacttaaaattgcaatttttaagaactctgttagagccagtatttgtttttaaaaccttacaagcagttatgccctttaggtcaggattttttgaggcccagtttgataataaagatagggcttcagtcataagaccttgttttctataagcacaagatatactgtaacctacttctacgtgtcctccttcatctggagttcctttaaaaccaataaaacctatgccacttttggtattcttatctacaatgagccagtaagtataccactcatgtatatctttaggtactttctccatctttttaatcttttttgagattgctgatttagtaaagtcaaatattgcgttttgattaatgtggactttaataagattaatagttcctttttcaatatttataaggtcatcaaaggacaatgggcgcaaaagtagtctttctgattctaatattattttattcatatttgtttttagggagagaagataaaatattcttaaaaactcccgctaaaggtcacctccatttttaaattatatatattcattatatagtacttgtttgttgatttaaattgatgttatagaagacttacaactttgtaagccttttttaagtataataaattttataacatcaccttatcatatagaatggtatataataaaagctttatatgaatgggggatattaatattgaatcgattaaccaagttttcgcttaagaatatgtttgtaatatttcttataataattttgattacagttggaggactttattccacaaaaactataaatatggagtctatgcctaatataaacataccagttgtaacagcagtaacggtttatccaggtgcatcgccagaacaggttgcaagcgatatatcgaggccagtacaaaaagcaatttcagggatacagggcatacaggatgtaaaaactacatcaaatgaaaatgtatctgtagtagttgctcaatttgattattcggctgatatggataaagctcagaaaaatgtagaggatgctgttaataagattaaatttccagagagtgctaagaagtcaacaatttctagaataagtatgggaagtgcacctataatgacttattctataaatagcactaaaagtatagatgaattaactaagattgttaatgataagattgagccaaagctcagcggaatttctggagtttcaagtgtagagatgcaaggaacttccaatgatgatatatatgtaaaagttgataatgataaacttaaaaataatggacttactttatcagatgtgaagactgcacttcagggaaataatatatctattccagcaggaagtgtaaacgtgggagatagtactcttccaatagaaatgaccaagaagctgtatactactgcggatatagaagctatgcctatagctgttattccaaatcaaaccaaggttgtaggagaggcatttcaacaggttcagggaggaatgacacaattaggacaggctgtcggtcaactaggacaaaatatgggacaattaggacaggctgttggtcaaatgggccaaggcatgggacaaatggggcagatggttggaggaaacacacagtccatcgcaatattaaatcaaatgcaaaaagcgcaatctcaaatattattagagcaggaggttttgactaaccctacctcatcagctcaagataagactaaggcgcaggcaactataacagcagctcaaggtatgcttcagcaggctcaagctcagcttgataaacttatgggcgcgcaaatagaaagtagtaaagctttaagcagctcagctggatcattgaaaaccgcagctccaagccaaggaacagcaaaatcaagctctgcaccaagcttaggcagtagttcttcttcaagcagttcaaatgcatcgcagattaaagttgtataccttaaagatgtggcaactgtaacaagaggaagtgcagataaaagttattttataagatcaaatagtaaaaacagtatcatacttaacatttataagacagatgatggaaatacagtaaatgttgcaaaagatgtagcaagtgctcttgaagatttacaaaaatccaacaacggcattaagtttaataagataagtgattcatcaaaatacgttaaggattctgtaaatggaatggttagagagggagttttaggagctctttttgcaatagtagttatagcatttttcttaaaaaatataaaggctaccataatagctgtagtttctataccactttcaatacttatagcacttatacttctacctagatttggaataactttaaatataatgtcactttcgggaatggcggtggcagtagggcgtatagttgatgactccattgttgttattgaaaatattcatcgaaggattctaaaagatgatgttgaaaagggcaagataattcaagtagcagcagacgaggtttcctctgcaattacatcatcaacagtaaccactgtagcggtattcttaccactagctatgataagcggaatggttggaaaagtatttgtgccttttgcggtaacagtagtaatatgtattttagcttcacttttagttgcagtaacagtagttcctgtaatgagcagacttatgatattaaatgaaaaaccgaagcctgaaaaaggtgaaggagctatagtaggtttctacaagaaagttcttaatggagcacttaatcatagagcagcagttatgggagtttcagtagttttatttgtactatcgcttttcctcattaaaggtataggtattcaatttttaccttctagttcatcaaatgtgttaaatggaacaataactacagcaccaggaacttccgcagaaaaaactaatgaagaagctttaaaattcgagaaatatcttttaaatagaagtgatgtaaaaacagtggtaagttcaattggtgataatagttcaagttcatcctctgcaatgtctatgcagggaggaaattctggtaagataactatagttcttaaagacggagttaataacgataaatcagcagatgaaattataaaaaaagctacagatatgtcaagcaaaaatactaaatttgctgttacagttcaaagctttacaagtggcagtaaggataatgttgaaatagttgtaaacggaaataacatgaaggatataacagcggcagcaagtaaggcaacagaagctcttaaaggagtaaaagaacttacaaatgtaaacaatacgctttcaagcaaaaaaccagaaatttcagttgcaatagatagcgcaaaagcagcaaatgaagggctatctccaatgattgcagcaggaatggttcagggtatcatgaactacaataatgttactacaatacaatcaggaaaaaataatgtaaatgtgtatttgggatatgacaataaggacattaattccctagataaggttaaaacaatacaacttcaaggagcatctggaagctttaatttaagcgatatagcagatgttcaggttgcagatggacctgtaagcgtagaggagcttaacggaaaccaatatgcatcaattacagcagatgtaaaaacaaaggatactcaaacagcatctaaaaatgcgatggaaaaaataaaatcaattaagggaattccaaacggggttacttttacccagaacggaagtgctaagagcataagtgatagtttctcacaaatgggaatggcaatgcttgtggctgtgtttatggtttatatagtaatggtacttgcctttggagaacctaaagcaccatttgcaatattattctcactaccatttgcagctatcggagcaatagtagctttatttataacaagacaacctttgggtattccagggcttataggaatgcttatgctcataggaatagtggtaaccaatgctatagttctgttagatagggtgcagagcaataggaaaaaagggatgctggtacgtgaggcacttattgaagcaggagctataagaatgagacctatatttatgacagcaatagcaacagtaatggcacttacacctcttgcggcaggtttctcagagggagcagtaatttcacaaggtcttggtatagtagttataggaggtcttgtggtatccacaatacttacacttataatagttccagtaatgtatagtgttcttgaaagagattaatctaaattaatttttaatattgaaacagcaggctgtagctaatagcctgctgttttgatttgtataattatagtaaggataatgaaactaaatttttaaacacaaatatttctatatgtttattgggaaaatagaaatatacattaaaaaatcaaatgaaatatatgctaaaaacttgtttgagtatataatagagacaataaagatcatattcattataagaactgcaattggaggaagctatgtataaaattttaattatagaagatgataaaaagcttgctgaatttacagaggagtatcttaaacggtataactatgaggtttttaaaatatttgatttcaagaaggttgaggaagaatttgaaaaaataaatccagagcttgtgcttctagatgttaacttaccttactatgatggttttaatttgtgtagaatatttagaagaaaatcaaaagcaccaataatatttatgtcagctagaagcagtgaaattgagcaaataagaggtcttgagatgggtgcagacgattatataacaaagccttttagttttgaattacttttggcaaaggttcaggcatctattagaagaacctatggagagtactctgaagataactctgaggttttaacagttagtggtattatagtagataaaaacacctttaagatgacctacaaagataaagaggtagagcttacaaaaaatgaacttaagcttataactaagctcttaaaaaatataaacaaggttgttacaagggaggagcttttagaagaattatgggatgaatcttcctttgtggatgataatactctaactgtaaatgtaacaagaataaagaataaactaagtgaagttgggataaaaaatgttgttaaaaataaaaggggcattggatattacttagactttaaggggtaaagactatattgtgttaggggtttttttatgtacaaaaagattattaagaattttatgaaggaaaagctttcatatagtataagtttttttttaagttcaggaattatacttttttatttttacgtttctaagaacataacagatgtggtttatccaatttttatggtggtttctatatatattatttttatagttaccgaatggtttaaatattacagatttaatgctaacttaaccaggggaatagaaagagagtactatgatttagaatcagtgactcctgagcaaaggatggcacaagaagctattcttaaaatacataaaaattatgcggctaaaataagtgagatagattataaaaattctgatataaaatactttatttctcaatggattcacaatatgaaaacgcccgtttctgtaatagatttaatagtgcagagggagaaagaaaaacttagcggagatgttataaagaacattgaagaagaaaattataaaataaaaaatggtatggatcaggtgctaaatataataaggctagatgagttttcaagagattatgaacctgagatagttgatatagtagagcttgtaaaaaggacaattaatttaaagaaaaaccaattcatatatggaaatgcatttcctaaagttgaatttcatgtagataaggcattggtgcttacagataagaagtggagtacctttataatcgatcaaataatttcaaattcaataaagtactctaaaaaagaggagaagggatatgtttattttaatatagttcagtctaataataagacgcatttagttataaaagataacggtgtaggaataccaaagtatgatttgaaaagaatttttgagccattttttactggtgaaaatgggaggaattttgaaaattctacaggtataggactttacatatgtaagaaaatagccgataatcttggacatgaaatatcagtagaatctgaaattaataagggtactatagttaaaattacatacatggctaaagtttgatttaaagttagcttacaaaaatgtaagtcaatattaatacaataagatttctttacttatataatttttctataattatagagaaaaatatttgaattttaaattgtttatatataatttttgtgtaagggatgtgaaaaatttgtatgttcttcaagcagaaaatgtaaccaaggtttatggcggaaggcttgaggttaattcaaacaatgctctaaacggtataagtttaaatattgaagatggagaatttactgcaattatggggccctcgggaagtggaaaaacaactcttttaaatatattaagtggaatagatgaagctactcgtggaaaaattaaaataatgggcaaggatataacaaagtttacaagagatgaaatggctatctttagacgcgaaaatttaggaataatatctcaagattttaacttgcttgatgatttgactttggaggaaaatgctgtattacctctttttattaaagatgatagtagtgaaaacgttaaggatagggttgaagagttatttaaattttttaatatatgggaacaaagaaataagtatcctcataatgtatcagggggacagcagcaaagagcagcggcttgtagggcactcattacaaatcctaaaatagtaatggcagatgagcctacaggaaatttggattctaaggcatctactaaatttatgaagtatatgcaaatgataaatgaaaatagaaatagcactataattatggttacacatgattcttatgctgcaagcttttgtaaaagagtactctttataaaagatggaaaaatgtatactgaaattcgtaaaaaagaaggaaaagaggatttttttaataggatattggattgtcttgctataattggcggtgaagtagatgaagtataaaaaggttctaagtaatagtttgaaaattaattttttcagttatgttggctttattatatcttcaagctttgctataatgataacttttatatattctactgtaactttaagtacccatatgccccaaaacaatgggagaacctttataaactatgtagtaaagctttcgattatatgcataataatatgtataggtatatttattacgtattcttataataattatattaaatggagaactgatgaatttaaggctcttattttaattggagtaacaaaggtagaattgagacgattactcataatggaaagtttcattttagtaagcgtagcatttattataggggcgtctttgggaattgttttttctaagatattcttcctttcaataattaaattgtgtggtcttagaaatgtggcttttcaaataacatataagaattatgttaatgtcatatctctttttttatggatgcttgcattaatgctatatagaagttataagatatcaagttttcttgatgcaaaaagactgcttaaatacaaaggtacgcctatattaatgaagcatgaaaatagaaagcttagaattttcattcttatagttttagggtgtatactttataaaaagatgtcaaaaggtttttctcaaaatatggagttttacatgacaaatatttttataagtgtatttcttgcatatttatcttcaagtccgtttatgtggattgtacggaaagtagtaaagaaaagcaaaaataatatatacatgcagatgaaaagtgtcaagagtatgtttgaaatggataaaaagcttacttttttgctttcagttatgagctttataatcatatcttatgtacgaataaattactacacgtatgatacaggatatcaaggcatgagtaatgtgtttgcagcaaataaaggctattttgtaactttcatatatgtgtttactatattgttatgctttattattttttcaagtattattttttgcaaaacttcctttgacatacgttcagttaagagactatattataaaatgtttataattggaattactcaaaatgaattcaaaagatttattagacttaaactttttattatattttttaaacctcttattcttagtttatttatgagcgtagtgtatattgagatttctaatctaaagtttaatttctcctttggaactgcatttatatatttggtatattttatttcactcttaatagggtattttggcgcagaaaaaaaatataaaaaagaagtatttaatagtaaggggatggctatatagtaagagaagcatccccttactattataatttaacggattgtatgaatctccttaatctaatcattccttcctttaaatccttcatggaagcagcgtaggaaattcttatataaccttcaccataatgagaaaaggcacttcctggaactacggccaaatgttctttttctaaaagtttaagagaaaagtttaatgaggtcatattaaatttttttattgatgggaagatataaaaagctccttcaggtttaacaacatcaaaatccatagaaaccagttctttgtatatgaaatcccttcttttaatgtattcttttttcatatattctgagtcattaaagccgtttgtaagagcctctaaagcagcatattggcttatagagcaagaacaagtagaaccgtattgatggagtttaaatatttcagaagttagatattctggagcaaaaataaagcctattctccaacctgtcattgaatgggattttgatacaccatttaatagaattgttttatttctcatgtcttcaaaaccagctattgaaaagtgcctttttttaaaagtcaattcgctgtaaatctcatcagatattacgaatatgtctttattttttagcaaattcactatttcagttaaagcatttttgtccattgcacttcctgtagggttgcaaggataacataaaattaaacacttggtttttggagttaagtatttttctagtatttctgcatttagaatgaaattattagaggaggtatccatatatactggctttgcaccacaaaaatttattacgggctcgtaaccaacatagattggagcaggaagaagaacttcatcatctttttcaagtatagttctaagagatatgtcaattgcttctgtagcaccatttgtaacaatgatttctttatcagaattataattaagattatattttttgtttataaaattgctggcagcttttcttagttcacaaatacctgaatttgcagtataggaagtatgattattatcaatagcttttttggctgataattttatgtgttcaggggttgtgaaatcaggttgtccaacagtaagattaattgcatcactatattttaaggctgcatcagaaatttctctaataggcgataattcaattttttttactaatggattaattgtacaactcatttttaggactctccttaaatttatttaaatgtgctaagcaaataaatatagtgtaaaagaccactaacaggaagtagttgtaatcattgtatccaaattcgtataatgtaattttacatttatataataatgaagtcaagaaaaatgtctaaaattactgcgataaaatgctatattgttaattaataataccattttttaagataatatcaaaaaaacgcaatacatatttatgcaaaataccaatgagttaatgattataaaatttacttaatatttaaatagactattattaataacactatgttaaaaataatgaaatgctaaaaaatacttcaacaaaaatacattttagtataaaaaagtattgataaattaataaaacagtaccagatggtaaaaaatataaagcaaattaaaaaaacatattgtaaatcaaaagaaaaagtgataacatatcaacaaaattattaatataatattattaaagtattaaaataagtgtgctaaactaaaaaaataattaataaataaggaacgtagttaataaataaatattcgtataaatattaaatagtattgtatacaaatacaaatacagtgttttgttaggagtgttgagtatggaaagaaactttagtgctagtcctataatggaaagaaattttgttgttaattctacaggagttttaaaaaaggtattactttgcagaccagattatattgaaattgaaccaatagatgagatatcaaaatcatggtatgaaaaagaatatgagataaataaagaggaatgtattaaagaacatgaggagttagtacaagcgtatcagcaaaatggaattgaggtaatattaattgatggaaagcctaaattaaaaaatcaagtattttcaagagattttggagcaactataaaagagggatatatacttggaaattttaaagagactgtaagaaaagaagaaacaaaagaatatgaggataaattaaaagaacttgaaattccatgtgtagctaagtgtgaaaagggagtatttgaaggaggagatttttggtttctagatgacaaaactattgccattggaactgtggacaggactaatttagaggggatagaagagattaggcgtcagatagaacggtttggatatgaggttatagctgctagagcagaaaaaggtaatttacatctcgacatgtgttttaatgttgttgcagaaaggttagcagtagcatgcgtggaagttttatctcaggatttccttagagttttaaaggaaaagaaatttcaattaatagatgttcctaaagaagggatagctaaacattattgtaatattgaagctttaggaaataataaggttatgtctttttacaataataaaaaagtaaatgaaaagcttgaagcttatggtatagaagttataaaaataagtttaaatgagttattaaaaagtggtggaggaatacactgcatgacatttcctataataagagaatagcttaaaaaggagggaaaagaatggattttaatacattggataaggtaataccagtattactacggggaacacttgtaacaataaagcttaccttcatggcaataatttttggatgcataatagctcttttagtagcaatcttaaaggtatcagctaataagtttctaaatgcagtaggaggattttatacatggatatttagggggaccccactcctactacaattatatgtattctactatgggcttccagcgttaaatataaatataagtgcaactcaggctgcaatattaggccttagtctaaattcgggagcttatatagcagagataataagaggaggaataattgctatagataagggacagtttgaggcgtcaaaagcgttaggattcccggaagggcccaccaatgaggaaggttatatttgcctcaagctgttagaggtcattaaccccccaatgggaaatgagtttatagcacttataaaagatacatcattagtttcagtaataacgatggaggaacttttaagaaaagctcagcttttggtttcgtcttcaggtgatgcagttacaccatatgttataacaggagtattttatcttgtacttacaacagtatttacatttttattttcacgtatcgagaaaaaattatctttgtattaggaggtgatattatgtcaatgatagagacctgtggattaacaaaagtatttggaaagcttacagtatttaaagatttgaacataaaggtaaaaagaggagaggtgcttgttataataggaccttcaggttctggcaaaagtacttttttaagatgtattaatcatttagaaattccagagaagggaagtgttgtaatagagggagaaaaaatagatagtaaaaataagaagacttataaaggaataatagaaaagatgggaatggtgtttcaaggatttaatctttttcctcatatgactgtgctagaaaatgttatggaggcaccaataacagtaaaaaaagaagctaaagctgtggtaaaaaagagagcggaagaattgatagataaagttggacttattgataagtgtaatgtatatccttcaaagctttcaggaggtcaaaaacaaagagtagcaatagcaagagctctttgcatgcagccagatataatgctctttgatgaaccaacttctgcacttgatccagagcttgttggagaagttttgaacgtaatgaaagatcttgcaagagagggaatgactatggttgtggttacacacgagatgggatttgcaagagaggtttccgatagggttatattcatggatggaggaaaaatcgtagaagaaggaaagccagaggatatatttaataatcctaaagaagagagaacaagggcttttttgaacaaaattctttaaatttcgaggttaatatgatagcataattgttataagtattattgcataaaaatacaatcttgaagcagaggggaatagtatgagtaagttaccagagatagggacaaagatttcgctaacagataaagcttatgaaataatcaaagatgctattatgactaatatttttaaaccaggtgaacttttaattgaagaaaaattagcagaacagcttgcaataagtagaactccacttagagctgctctaagaaaattagcgtatgaccatttggttgaaataaattcatctagaaatgtaattgtagcaaacataggtcaaaaggatgttgaagaaataactgttgttagagaggttttagagcctttagcagtaaaagagttagagaataatataggggaagatgaacttaaaaagcttgaagaaatactttgtaggcagaagaaagcagttttggaagataactatgaagaacttattaaaatggaatatgaatttcatgtggctataggagagctaacgcataataagtggctacatggaatgcttaaggatataaatactattgtacaaagatatcttatattatcaggaagcttaaataagtataaagaagttgcaattaaggagcacgaagtaataatttctgaaataagacaaggaaattatgataaagcggtggaaagtatgaagtgtcatatatcaaatgtatcaagtagaatgcttaaataaattaatgaatataaatatgaagtggagggtaagaataaaaggacaaaatagatttgtttgaataaatattcgtatattttgcataaaaatgcttgattaaattaaaaagcttttgtataatataactatgttgtgaggaaattatgtttaaaataatatgaataaaaattcaaagaggtgtttggttgatgaaaaaatcggttaaaaagataatggcagtaatattaacagcagtaatcggcgtgggacttctagcaggatgttcaagtacaggaagttcaagtaacgatgaatcactcagtaaagtgaaaaaggctggagttcttaaagttggactttcagatgattatccaccaatggaatttagagatagcaataataaagtatcgggttttgatatagatatgataaatgctataggaaaaaagatgggagtaaaggttcaaatagttactaactcctttgatggaatatttgtagcacttaaagcgaaaaaatttgatatggttcaatcctgtgtaagtataactgatgaaagaaaaagtacattactattttcagatccgtatatatatggcggagttgcagtattcgtgaaaaagtcaaacacaacaataaaaaaaccagaggatttaaagggtaaggtagtaggctgtcaagctggtacaacagcagaagatgctcttaaaaagtttaatggcttaaaggaaactaagaaatatcagcagacaacagatgcatttttagatttagaaaataacagaatagaagcagtagtagcagacccaatggttggagattattacactactaagaatcctggcaagtatgagaaaataagcaagtacttaggaaaagagccagttggagcagctttcagaaaacaagataaaactcttaaagatgcatatcaaaaggcatataatgaacttaaaaaggacggaacattgtctaaactatcaaataaatggtttggttatgatatctatagttcacaaaataagtaaatatttaaaaatccgatttcaatttatgaaatcggatttttattttttgaaataaaatcaaatttatattgactattatattagaatattctaatataataatatagtaaaggagggataaagatgaaaaaagttattatagtggggggtgttgctgaaagagctgaggattgaaatgtaaatttatttatttagaaaagtatatatattatggggagtagggtttttataatatggataatgcagaagctaaggatggcttctgcattatatatatttgaaaatatatattaaagagttctagcagtttcttcaactgtttttgcgttattgtttacttcctgaacagaagctgaaatttcttcaagggcagcagcttgtgtgtcaaaagattcgttggaattcctgattttatcagctatttgttgaacagattcttctatattttttaatacttcatttatttccttaatagaatcgcttgtagaattagataattttctaatatgttgagctacaacgctaaagccttttccagcttcaccagctctagctgcttcaatggcggcatttatgccaagaagatttgtttcttttgcaacaccctgtacaaattttaatacacttccactatttttggtatgctctattgctttatgtacatttactaaaatatccttattattttcacttaacgtttgaatgtttgcagtagactcttctacagcagctgatacattagatatagtatctgctaaatcactagataaatctaaaagtttattttttgcatcaatgcttttagatatggaaatagaacctataaattcaccatgaccatttttaattggtaaggtatagcgtctaataggtatttttaaagaactttcgttgatatcctttgtagtaggagtaccactatttataatttgttttaaatcattggtgattggttcaccttcgttaacatttaaggataaaccagaacttttaactacttttatgtatttttccttatcggttactaatatacaggctttgttatcaaaaacaacgggcatattttcagcaatagttttcattaaatttagaatgacttcatttgaattttccataataaattctcccctttttttcattaagttcaataatttacctataataagtttaatactaacacgatgcaaatgcaattagaagtttgatacttttggatagtaaaaagatcatttatatatgacataattataaatgatctttttaatttttaagaagctggtgaattcaaaaagaaatttgtaatatagcacaattcattatctgaaaaatctactagatacttgttgtacaaataaacgaaattttcttttataacagagtaaactttcatattgtcttttataaagtcttctttatcaggatattctgcggaatggcttcctttctttaatctacttatagcaaaggcaatgtgaagtactaaacctataaaaacctcatcatctacttttaattttaatttgaattcaactctttttacaaatctatatatatcatcataaagctgctttccatcaatattatcaatgttttctttaagtattaaggaaagctttaaaattacggattttgtatccactagctgttgaatttcgtcaatcacattcatacttaaaacatcatgcatattatactgttttatatttaagtcaacaggaaaagaggagactaaaaataaaatttccttttgctcaattattgataaaagttccttcttaaagtgatttttatcaaggcaatttaaacatagtatttcaaataaatccttatcgtattttaaattgctatttagaaagctttttatagcaagagaacctccttcgccagtaagacaagcagttactatggctattttctttcttattggtttattgttaagttcgctagaatgttgggttatatgttgatatgaatttattgtaagtatgttgttaaaaatctcatctattgaaagtccaagcatggcttttctggcagcttcaattacatgcagagttgatacaagaggaaaaacctttactggtatattaaattccttctttataatctctccaaaggttgtaagggaacccatatcaacaagaagtatataaccacttgttgataaattactttttacggtctctttaagttctccaagtacaactgatggtttcatgtccaaaggacagtttatacctataacaaaattctcctctagaagtgtgttggcaacctctgccatagaagtagcagttgattttccatgtgcaattataattatttttacagtgtctattacttttgaaggagacttttcatcattattaacaatgaataaagctatataacctgcttcgtcatctggaataggatgattaatataattttcaatctgtttttttgcatttaaggctattttgtattctgtaggatacagactttttatttttctaagttcaggattaattatagttttattgctgtttattcttgttataagagtgtttatatgaagagcaagagcagtatacacattattattaatattttttctaagggaggttacgatttgataaattattttatctacaaagtttaaagtatcctctcctagtattgtaataagattttttttgttcaactcttcagaaataccactaatatattttgtgaagtattttgttatatccttttcaagaatgttttctatatctatattggaaatgccattatgctttagggcttgaagtttttgctctatatattcataaatattgcttttttttgcattttgagaatcttcattgatatcataggcttcattacttgaaaatttaaagtattctatttcatcacccattagcttgttccaaagtattctgtgttccttttctttaaaaagaccctctttaacataaataggaataaggcgactattaattctaacatcttttatagagccagttaaaaattcagaataggccctagcacatacaagttgaacgtcgcttttaagctgtcctatattattgggacaatcatacgaaaggaaggctctcactgtattaagagatacagaaatgtctctattaagctttttgctttcatctttaaaaaaggttttcactaaatataatctttcttcgagtgttctttcagaaagagaaggtattgtaattagcattggaattcttctagtaaaggtctttaaaagagaagagttaggattttcagtggttgctgatattattaaaacattggaacttcttgatttatcgtctcccattcgtctaaaaattcctttatctagaaaggtaaaaagtgcttcctggccttctggaggtaatctgtgaacctcgtctaaaaacaatatacctccatttgctttttctattaaaccgattctgtcactatctgcaccagtataagttcctttctttattccaaaaagctgtgaagttagaagttgagggttgttgctgtaatctgcacaattgaaggttataaaaggagagcctttttcctttactctcatttcaactgcatattcgtgcataagagaagcaaacattgatttacctactccagtgtttcctagtattaaacagttcataccgtttggagggtaaagtatagccgcctttaattgttcaacggcctgcctcaaacttaaattattttttacgaattcatctaatttgcttttttttattttagtgtttatagtgtttgaaataaaaaataaaacaggtctgccatttgttttaaatatttttccttccttgcacaggttatttagttcatgacttacgttagctctgctcatatttagtacttcagcaagctccttcgcacttatcttagtgccctcaggcatctcatacaatttattgtatatttgttcttttctattcataatgtaatcccccgtataaaattacttaatattgattatacaacaaaaaaatcactatttctatgtattgtataaaagtgtttgaacactaaaatgtttacatataaacactatgcttttaatttaaacactaaataaaattgttgataaataaagactttaagaagcaaaaaagtgtttggcatgatgtttgctttaatagttaagtgagaaaaaaagtatttgactggaggggtacgaatggatatagagcaaataataatgaatataataatttattccggcgatgctaggagctacatgtatgaagcgcttagcaaggcaagagaaggaaagtatgatgagataaatggcttaataaagcaagcaaatgatgctataggaaaggctcatgatatacagacttcaatgcttcaaaaagaagcagagggcgaggcactaaaggtttcaatattatttgtacatgcgcaggatcaattaatgaccacaatttcagaaaaaaatcttataactgaaatgattgaaatgacaaaggatataaatgctttgtccaataaataaaaagaaaatgttaggaggaacaattatggttagaattttattattttgtagtgcaggaatgtcaactagtatgttagtttcaaaaatgaaaaaggcagctgaagcaaaaaatatagaagcatttatagaggcttatcctcaagcacagatggctgattatgccgacaaggctgatatagcattacttgggcctcaaattaaatttcttttaccaaaagcaaaaggagtatttgatccaaagggagtaccagtagaagtaataaattcagctgattatggaatgctcaatggtgaaaaggttttagatcatgcattaaaggttttaggaaaataaaagacaaacttaaggaggtagaaaatgaaatttccaaaggatttctttttaggtgctgcttctgcatcataccaggtagagggtgcctggaatgaagatggaaagggagtatctaactgggatgtatttaccaaaataccaggaaaaacttttgaaggtactaatggagatgttgcagtagaccactaccatagatacaaagaagacgtaaaactgatggcagaaatgggacttgattcatacagattctccgtttcttggccaagaataataccagatggtgatggagaaataaatcaaaagggaatagagttttacaataatttgatcgatgagtgccttaaatatggcattgtaccatttgttaccttgtatcactgggatatgccagaggtactggagaaggctggaggatggacaaataaaaaaactgtagatgcctttgtaaagtatgctaaagcgtgttttgaagcgtttggagatagggtaaagcgctggattacttttaatgagactatagtgttttgcagcaatggatacttaagtggagctcacccgcctggtataacaggagatgttaaaaagtattttcaagcaacacacaatgtatttacagctcatgccagatcagttattgaatataaaaaattaaaacagtatggcgaaataggaataacgcatgtattctcaccagccttcagtgttgatgataaggaagaaaataaggctgctgcatatcatgcaaatcaatatgagattacctggtattacgatccaatattaaagggaaaataccccgaatatgtaattaaaaatatagaaaaacaaggatttttaccagattggacagatgaggaattgaatacattaagggaggcagctccgcttaatgactttataggacttaactactatcaacctcaaagagtaattaaaaatcatgacacaggggaaaaaattgaaagaacaagggagaactctacaggggcacctggaaatgcatcctttgatggattttatagaacagtaaaaatggacgacaaaacttacactaaatggggctgggagatatcacctgaatcattaattttggggcttgagaaattgaaagaacagtatggtgatatcaaaatttatattactgaaaacggtttaggcgatcaggatccaataatagaagatgaaattcttgatatgcctagaataaaattcatagaagctcatttaagagcaataaaagaagctataagtagggggataaaccttaaaggatattacgcttggtcagtaatcgatcttttaagttggcttaacggatacaaaaaacagtatggttttatatatgtagaccataaacacaatttagatagaaagaagaaattatcattttattggtataaaaaagtaatagaagaaagaggtaaaaatatatagtttaaacaggacttaatttatataccatataaaattatcgaggaggaattataataatgagtaaagtagataccattcaagaaaaactcataccgccaataatgaaatttgctaactctaaaattataactgccataaaggatggagttataatcacaatgccacttactctagttggatcaatatttttattgattgctaactttccaattaaatcctggaactcttggatgacagcaatatttggaccaaattgggctgttccattaactcaggtttcaggttcaaccttcgatataatggcaattgcggctgtaataggaatagcagctcaatattcaaaaaatgaaggccaggatccagttacagcaggacttttaggtgcagtagcatttttaattatcatgccaagttattcaccaataaatataggtgataaagttggtggaattgttatgaaacatgccgacaaggttcaaagtgtaataccaaaagcttggaccggcggtaaaggaatgatagccgctttaattattggtgtacttacaggttatatttattcgtggttcttaaaacgtgatataagaatcaaacttccagaaagcgtaccatcaggtgtttcaaatgctttctcagcattaattccaggtgctgttattataacaggttctatgttaatattcatattctttaatattgttacaggtgcaactgcacttgaatggatttataaagtattacaaattccactacaaggaataacggactcattaggtggagcaatagcaataccatttgttatatctttcttctggtggtttggtgttcatggtgctactcttatcggtggtgttatgaactctatataccaagcaaatacattagcaaaccaggatgttttcaaagctggacataaattaatagcttcaggagctggaaaaaatgctcacatagtatgtcagcagttccaagataactttgtaaccttaggaggttcaggaataactttaggactagttgcagcatgtttcttattcgctagatcacaacgtcttaaacagttaggtaaattagccttagttccaggttgctttaatataaatgagccagttctatttggtttaccaatagttttaaatccacttatgtttataccatttttgatttgtcctcttgtttcaggaatactaacttacttcgcaatatatactggtttagtaccttgctttacagctgttcaagcaatatggactacaccgcctgtactatcgggtcttatagttgcaggttggagaggagcggtactccagcttataataattgcaatagctgctatagtttacttcccattcttcaaaagtcttgataaacaatactatcaagaagagatatctggagaagcagaatagaaatctaaggttaatctaaattaagctttggattaaccctgtaaagaatatgtactgaaggaaaactaaggtaaaacttagcttacccatattagtattcaggggggaacagtgtggatagttaagtttgcctggttttcatatacataaacccacaaactatattattttaggaggattaaaatgaaattatttaagataaaaatcacaggaagcttagaggaatttaaaattgagtactctttctcaacagattactttaactacaaagagtgtacttatgaaggaacagaacaagaaagatacgatcaattctatgaggatttaaaaacaaatggaggacctcagccactaaacataaaattaaaaatgtcaaatggtgtaatggatagagcgttccctaaaaaggatctcctaaaattaaagaatgtccaagacttcgtcaaaaaaatgtacacctaaagaggtttgggcggagcccattatattcatgaacttagaaaaaacacgtcattcaaaaaagaaaataaactaattaaggatgtcgttaataaagaggtttgggcggagcccattatattcatgaacttagaaaaaacacgtcattcaaaaaagaaaataaactaattaaggatgtcgttaataaagaggtttgggcggagcccattatattcatgaacttagaaaaaacacgtcattcaaaaaagaaaataaactaattaaggatgtcgttaataaagaggtttgggcggagcccattatattcatgaacttagaaaaaacacgtcattcaaaaaagaaaataaactaattaaggatgtcgttaataaagaggtttgggcggagcccattataatcatgaacttagaaaaaacacgtcattcaaaaaagaaaataagctaattaaggatgttgttaataaagggggttggaaagatagcgtaaatccatcattacgctatactatttctacgattatcactcaaataataatgctagctacaaaaattcatataaatacacctctacctttaatataggtagtattaaaagacaaataagttgcaatggggtaacaacctaaaaaacacgtcttagctaatgaaaaataaatttcatatgaaagctagggcgtgttttttaattattttaaaggcattgagcccgtaacaaatctatattctaaagtattttcattatcattatattgaacaactcttatagtctcaaaggatttagcattattttttactctatttgctaaaacttttttagtataatctttatctacctgctttaccgaagaattaaagtctttaaaatcataattgctatttccagttaagctggttataaattcccttagaaacttacaatatctagtatcaaaatgtttattgtttttttgtcttacatccaactcaacattgttataagctgttgtatttccctttccatcagttataatatcaccagtatatgaaatatcatacacatttccattattgccattttcttttatatctttagcattaaaagctaaccaattacctttagaatatttatcattcaaagtatatttaattccatatttatcacatattaatttcaatttatctattatattttgtccttgagatacaaatttacttcgagttacgctatattttgattttaaattagtactagtgttactaggtatccactttgatttaacggaagctttagactttgatgaattatcgtcggattgacctgtttttgagcaacctactgataatagtatcataaacattatagcaatactgcaaagaatttttatctttttttctttcactaaattacacatcctttgttaattgtaaaaacttgtttatattataatataattatttaaaattattataactaatattaaagtttacatttaaaacatattataaaggtagaaaatttaggagtcaagcactacatataggtatttataaagaaaaatgttttgtgctaaggctaataataggtattaaaacttcaaaatatcaattcaaatagttcaaagaaaataaaattaataagatatgtaagttagtatagggagggtgacaaagtacattaggattatgaactcaaattaactcatcttttatcaaagctaataaactctaatacaacatataaattaggccagaggttttggcagagcccattagaatcataaaccccaatcaatccgtcttttatcaaataaaaatataccgactaaaattatcagcgaaataaattaaaaacataaaacattgcattaaaggaatatttagagtggctaataagctagcatagaaaaatattcttgacaattaaaataatagaacatataataatcatattaaacaagttcgaaaactaaataattgtttcttatcaagagtgacggagggataggccctatgaagtccggcaacatccaattattttggagatgtgctaattcctacaggtttatcctgagagatgagaatgtttttaaaactgcttcttattttttaatggataagaagcagttttatttttttattattaggaggagaagattatgggagaaatagattgtagaaattttgagacaaaagcagttcatggggagagtggttttgagagcagaactggggcaataagctacccaatataccaaagttctacctttagacatgaaggcttaaataaaggaactggatatgattattcaagaacaggaaatcccactagagatgaagttgaaaagacagttgcagcacttgaaaatggtagagcgtgtctcgcatactcctctggtatggctgcaatatcaagtgttcttaccatatttaaaggtggagatcatataatcgtttcagatgacttgtatggaggaacctatagaatatttgaggagatatatgaacattatggaattgaagtcacatatacagatacaacaagcactgaaaatatagaaaaggaattgagggaaaatacaaaagccatatacctagaaactccaacaaaccctcttatgaaaattactgatataagagaggttagtaaattagcaaaagaacataatactttacttatagtggacaatacttttatgacgccttactatcaaaaaccactagagcttggagcagacatagttcttcacagcggaactaagtatctttgtggacataatgatgccttagcaggttttgtcattttaaatgatgaaaggttaattgaaaagcttagatttatacaaaactctgttggagctgtgcttgcaccttttgatagttggctaattttaagaggaataaaaacccttcacataagacttgatagacagcaggaaaacgcaattaaaatagcaaacttcttaaaaaaacataagaaaattacaaaggttctttatccaggattagaggagcacgttggtcatgatattttaaaaagtgaagcatcaggttttggagcaatgatttccttttacgtagatagtaaagaaaccgtagaaaaagtacttgaaagcgtaaaagtaataatttttgctgaaagccttggtggagtggaaagtttaataacctatccttatactcaaactcatgcagatattccagatgatataaggaaaaggctaggcgttacagataagcttcttagattttctgtgggaatcgaaaatgtagatgatttaataaaagacttagataaagcattgcaagcataaatattaagggggattttaaaatgaaatttggaaccaagcttatacacagcggatttgaaggagataaggcaacaggagctataagtactcccatatatcaaacttcaacctttcatcaagaaaacatagatggacatgtaacttatgattacgcaagatcaggaaatcctacacgtgaagcattagaaaatacaatagctcttttagaaggaggttacaaaggctttgctttttcatcaggcatggcggcaatttcctcggttttgagcattttttcagcccatgatcacataatcgtaccaaaagacgtttatggaggaacctacagaataacaacacaatttttttcaaggtttgaagttgagtgtgaatttgtagatacaacagatataaatgaagttcagagagcaataaaaaagaacacaaaagcaatttatatagaaacaccatcaaacccacttatgaaaataacagatataagggcaatagttgaacttgcaagagaatacaagttattggttattgcagacaatacatttatgtcaccatatcttcaaagaccactagagcttggagcggatatagtagttcatagtgctacaaaatttttaaatggacacagtgacattgttgcaggccttgttgttgcgaaaaataaagagctagcggataagatttactttgttcaaaatgcctttggagcagtgcttagtccacaagattcatggttattattgagaggaatgaaaacccttaaggtaaggctaaattatcaacaaaataatgccacagagcttgcaaaatggcttctacttaacaaatttgttgatagagtacactatccaggaatgcctagccatgaaggcagagaaatacacctttcccaagcctcaggagcaggagctgtattgtcctttgaagcatgcagcactgaaaaagcaaaaagctttatgaaaaaagtgaaatgtgctgccgttggcgtaagtcttgggggagtagaaactatagtctcatatccagctaaaatgtcccatgcagaaatccctcataatgaaaggattaaacttggaataggtgacaatctaataagagtatctgttggacttgaggacatagaagatttaattgagaatttcaaaatagcacttgagtagaaaatattctcatgggtaagttaatttataattatttattgaaaaaatgatattcaatttatgatcgaatcaagaatggaagaatttttattgatttttccattctaaagaaaaaataaaatcaccgtgaagctttcataataaaagcctacaggtgattttttcatgtgctttgtaaagattttaaggaaattatttgttaatggtgatagaggagtataatgaatttaaggaatggcttaaaaccgttggtacaccttcaggggtttgggcggagcccattagaatcatgaactcaaagcaatccgtctttcaaaaaaggaaacaaaattaatatgatatgtaagttggcatgggtattttcaccagtaaaacttcagaatagtgtgtaaatacatattaattatgaatataaaaatactaccccaaaacaaaaattagagtatagaatctaagtcttgttttgaggtagagtaattatcaattaagtatgctattatatatatcttctaactaaaatgccgtctatagatcccatgggcctaatttagcccaagtttgagaaccaaccttaccatctgtagctaatccgttatatttttggaataattctacaaggcatagagtattgtaaccgaagatgccatcttcgaaagcagattcagatccagtagcaccatatttttgaccgtcatctatgtgatgtctattgaagtaatagtagaggccagtttgaacttccttgacagcatatccaatatcaccatcttgaacaattccgccaccatttaaaattgcaacaatgtttggaccaccgcttggaccatagttaaatgactcatggattgtatttgcagcagtagcagtagcggtagcaggtacctgtgcttttgtattatcagtagcagcaaatgcagttgaagaaattaaaacagtagacataattcctaaagataaagctttcatttttaagtttctcatttttaatccccctgtaaattttatttttaatacatatataacatacatctaaaatacataaatgtaaaatactgtatttaaacgttttctgttataatgatttaaataagacaggttatttcaaataaatgtaaaatatttaaattacatttgtagttgtacaattgaaaaaaattatctgttaagctataattaatacaaaagtaataatactacccaataaagttttttattactgataaagtctatcaaaaataccttatctgtaatttaaaattcaatttccttattgcaatctacttgtcttagtagtatgatgtatttgggaaaccggttactaaaggatggtgaaaaatggacaataataaaaaggtagtaatagacgacgtggctaaattagctggagtttctaaggcaactatatctaggtacctaaatggaaaatttgaatacatgtcagaaaaaactaaggacagaataaaagaatccattgaagaacttaattatagacctaacaacatagctagaagcttaaaatcaaataaaagcaaacttataggagttgtaatagcggaccttacaaacccattttcatccataataatcaaaggaatcggagatgaatgcaaggctaggggttacaacatggttattgcaaattcagataatgatgttaagcaggaagaggaatatataaaatctcttttagatcaaagagttgagggaattatagttaatagtacgggctataatgaggaatttttgctcagcataaaagagagaggtattcctgtatccatggttgacagaaccttttgtgaagataaagttgattctgttaaaagtaacaactatgacatcactgttgagaccattaactatcttatagatgcaggttttaatagtctatgtttctttactgaaagacttgataatataaagcctagaatagaaagagaaagggcatttattgatgtttgcagtaaaagacttaaaaaggaaaactataatatttcagttgtagactatagtaaggctggaaatttagaagtgaacatatataagtttttaaataattatagtggtaaaaaagcgatatttgcagtcaacggagttgttctacttcatactttgagtgcaattaataagttaaatataaatgttccaaaggatttaggaatttgtggttatgataactggggatgggcagcgcttataccaccaggaattactactatttcgcagccatcatatgaaatgggatctgaggcagcaaagcttgtacttgatagaattgaaggcaaagcttctttaggagcagtttgtaaaaccttaagtgcaaagcttgagataagagggtcaacaatacctttaaatatgccaacatagtttttctatgttgacatatttaaagataataacatatatattttttagaaaccgatttacaaaacaattaggaatgaaaggaagtataaaattatgaataagaatgaaattaaagcaaaaatgaagagcaaggcaattgctgttgtaagatgttcagaatttagtttagctgaaaaaatgtcaaagagattaatatcacaaggaatagatacaattgaggttacttattctgttaaagatgctggaaagttaataaaagctcttaaggatgaatatccaaatagtttaattggagctggaacagttgtaacagctgcacaagcaaaagaagcaattgactatggtgcagatttcatagtttcaccatgtatagttgaagaggtatgtgaatactgtgtaaaaaatgatatagcatgctcacagggaacagcaactcctacagaggcatttaaagcagcaagcttaggtgctgatatcattaaaatattcccaggaagttcatttaaaccttcatatataaaagaattaaaaggaccattccctgattttgattgcatgcctacaggaggagtaagtgacagcaatgttaaagagtggtttgataatggagcatttgcagttggattaggtggatatttcacaaagaatataactgaagacaacttagaagaaatagatataagagttaaaaaagtattagatgcattaaagaatgcataatgtagaaatattcttacattaatatagcataaatagaaagtacttgggtattttaagtaataaataggtgctgggcaaataaaactgaaatggaaactgcaaaatattgaagttggtcttgagtatagttgctaagatccttcagttgttaggagcaaatttaatttctatatatttatgaaagaaagctagagaactgttaacttataatcattagaagagcgtaagttttacggtgggttttatatctgactttgaaaataaaattagtaggagaatgataaaatgagtgagtttataacaattggagaacctttagcattatttgcagctgaaggggaaagtgaaatagataaaagaataagcgaagttgatcactttaaaaaatttctagctggagctgaagtaaatgtttcggttggtgtgtcaagactaggtcattcagctcagtacataacaaagcttggagaagatccatttggtgaatttataaggagaagacttaatgaagagaacgttggaacagattatataagttcaacaaataaaaaattcactggttttcaattaaaatcaaaggtaagcgagggagatcctagtatattttattttagaaaaaattctgctgctgctaatttttcagtagaggatttaaataaagtaaatttagatggtgttaaacatgttcatattacagggatttttccagcattatctgaaagtactaaagaagcaacatacaagctattggagcttgcaaaggaaagaaatataacaactacttttgacactaatctaagacctcaactttggaatagcaaggaagacatgattagtacaataaatgatatagcatttaaaagtgatatattacttccaggtataaatgaaggtttagtacttatgggaagcgataagcctgaagaaattgcggatttctatcttaataaaggcgtaaaactcgtaataataaaattaggttccaaaggtgcatatgtaaaaacaaaagatgaagcttacacagttgaaggttttaaggttaagcatgtggttgatacagtgggagcaggagatggatttgcagttggagttataagtgcaattcttgaaggaataagtgttaaagaagctgtgagaagaggaaatgcagtaggtgctttggctgtaatgtcagagggagacaacgacggatatcctacacatgaagaattagaaaaattcctcggaaggtgattatttgaaagtacaattagctttagacagaatgacaatagatgaggctaaaagtattacagaagaagtatatgattatatagacataatagaggttggtacatcgcttataaaggattacggaaaaaaatctataagctctatgagagatgagtttaaggataaattaatattagcggatataaaaacttgtgatgaaggtgagtacgaatttaaagcagcttatgaagcaggagctgatattgcaacggttatgggaacttcaccctttgaaacaattgaaatatgctacaaggtttcaaaggaatataaaaaacatatgatgattgatttgatggaaacagatgatcgtaaaattcagcagttaaagacttgtgaggatgctattttgtttcttcatcttccaaaagatagtgaaaataaaagtttattagacatgtttcaaagtaaaaaacaacttttcaaggatgtaaaaagaattgcagtaggtggaggtattagtgaaaaagtaatgccgggtataacgcttattaatcctgaaatagttgtagtgggttcatttataacaaaatcaaaaaatttaagtgccgcagctagggaagttcggaaagtattagaaaataggagatgatatccatggaagttcttaaagacatattaggtgaaattacacaggtaattaataatgttaatgaaagtgaaatggatggagttgtagattttattacaaagaacaagagagtttttgtatgcggtgaaggacgttccggattaattgggaaatgctttgcaatgagacttatgcatataggatatactgtttatgtggttggagaaaccataaccccgtcaataaaggctgatgatgtactttttgccatatcgggttccggcgaaacctctatggtattaaatttggtacggaagtcaaaggatatgggagcgcacataataggaataaccagtagagagggttcatctcttgcaagtgcttcatttaaaaagataattgtgcctggggctgtaaaaggcgataagggcacggataagaagtctattcaacttctaagctcattatttgatcaaagtgttcatatagttatggatgcactttgtttaaaattaagttataaggatagaatagataatgatgcagcgataaagaatcatagtaatttagagtagaacatttcttttgcatgattttttaacataaacatacacacaaagaaccgttgtaatagcataaaaaatgctgttatagcggttttttgttttaaaaagtgtgtgggaatgtttttaaaatataaagtacttatatattaggacttatgaattcatttgattttacgtttaatattgttaaaaataataatgataaaaaaggtcattattgacatataagatgaaagacaataaaatatagtgagattaaatgaaggagatgaggattatttgttaagatacgatgtaacaccaaaagaattaaaaatttcagctaaaatatttaaagaaaaatcagatgaaattatgggtaggatatcaagattaaaggcaagtgtagatatatatggtgctacatggcaaggagcaggacatgatgcgtttgaaagtaaatataaaataattgaaaaagatatacaaaatattgcaaagaaattagataatatcgcatgggagctaaataatacagcaaatacatttgaacaagcagatgaaagagaaaagcagaagattaatgcccttttcaaattttaaccaaaataaaaatttaggaaattatgatatgggggctagaaatgaaagctaatgatgatataaaattaaccataagggatttagatttactttctaaaaagttttcttcaataagtaatgatttttatgaggacaaggctatggtaaatacacagcttaagcttttagagagcaataattctggattaaatagcactgatattatatataatgatattagtaaagttatgaaggattttgatagcatagtacataagctgagtcaaatgtctaaagacttagaagtagctgaaaaagaatacaaagatgccgataattcctttgaaagaaaagtaaatgaagtgctgcatacagctataaatgaggtggaggattttggagaggatatttgggaaaaatacaagaagactccgggagaaggcgcagcgtttttaagtgcggcatttaattcagcaaaagatatgacgcttggtgcatttgacttaatgatgtatggactttatatgaaggctaatccagtagcgcatggaaaggaattatatagagaagccggtgaggtatataagtgtattaagaatcctaaaaaaatcatggacaacttaggtccattgggaaaggcttttttaggaataaatgataaggaaataaaaaatgcagcaatacatggggacagctatacaattaaaaagaatatgtatgcagtatcaattaatgctttacttataggagatacaggtgctggattattaggaaaagcatcaaaagtagagaaaaacattaataaagcaggcaaattggagagtgctggtaagaagtttagtgtgtttagtaaagatataccgaatatagaagataagctagctagttttagagaatttttagctaataagctcagaggtgttactagagaaataccgaatccacagttagtaagagattcaatgggaaatacttatatggtatgggcaaaaaaaggtggaagttctgggggcgaggttctaaagaacgaaaaggttgttaatggggtggctgaaacaggtggaaaacttttatcagtagaagagtatctaaaaagagaggtagaagctgaaaaaatgtatgatataattagaaattatacaacagatgtaaaaaaaatatccgaaaatacaggaataccagagtcacgtattaataggataaaagaacatgttttctataatgaacatatcaaaacttatgaagttggacgatttgacccaaactatgatatggcgaatgcatgggaaagattaatcaaaggaaattatgtacaaagtgatatagatttattaaatcatgaaatattcgaatctaaatttgaatctatatttaaaacagactattctacagcgcattctaagacagaatcaactggtaggatatggaatccataaaggaggttaaaataagatggcagtatatgtattattaataaaggaatatgaagatgatgaaaaagtagtgtataaatatggtcctaatgaagaaacaacaggaaagatagagtataataagataagtagagattttaaagaaatagaatctataaaaaaagaaggaatttcaaacgactttttcattaaccttacagctcaaagaattgcgagaattgttggaagagaaaaaggaatatttcctgaaagaacaacaattgaatcataaaatagctgcataaaaaattaaatagttacaaactgagtaaaactaattattaattaaaaaaaggatgtatgtgtaatgttaataatgtagtaagatgcaacaaaattgagaattaaatatatatcagaggaataatgaaggttaacgctgataaaaaggcgttagcctttttttatgcataaaacaatgtccacagttagtaagagattcaatgggaaatacttatatggtatgggcaaaaaaaggtggaagttctgggagcgaggttctaaagagtgaaaaggtcgttaatggggtaagaaatgctggtgaagaaattgtaggtactgagcacagtgaaataagaccaacttaggaagtatttaatagacataaggcggattcatataaagaaaaactacttaatggtgaaaaaatagaaccaattgaagtttatgagatagagggaaaaggttattatttacaagaaggacatcatagatatgtagcaagtatagaaacaggaatacctgtagaaataaaatatttgcctcatagtggtccagctggcatgccaaattggcaatatatgtgatggaaggaatatgtaaatgaagaacaattttgggaaggttaaagtatgggagtagaagcatatagatttgcagtgaatatagaaaaaaaagaaaataagcaagctataaaagaaaaattattagagttaggtggtatattgataagtgaagatgtttgtggaagaataaatatagatttttgctatgaagaaggaataattgaggtattaatggagaatccgtatgaaatccataaagagttacgtggtgtagaaaatataagcaatgtaaaaaatcaattaagagtatatatgagaatagcaaagccaaattcagaaaaagtaattgataagttaatggtgttattatctgatattaattcttattttggtattaaaggaatactagatttaataacaggtaaaaaagtagatatatgtgattatactgaatttaaaaatgattttataaaggcaaaaatagaatttgaaacattttattctggaataccatatccaataaaatgtcatgaagtatttcctaagtatagagaaataatgggtgaaaaataaacagttgatgtataaatttgagaatattgaatactaaaaattgattattatattttagtatactcaaattgagactcaaaaaagaggaataagtttatcttataactaaaatagagttaatgtttcaaatgagaaacattaactctttttatcgtttgaatagaataaaaatcaggtgctaaataattgaatatggtaagagataaagaaacattgataaatataattaaaggaggactggtttaatgttatatgaacaaataaaacaaatattatctataagggaaaaacttcaccctgaagatgacaatggaatacaaaaatgctgggatgaattaattgagcttcttagtaaaggtgatgagcaaggttataaaagtaacaactctaaaaataaataagaaaaatcctcaaaatgctggaaatcattttgaggatttttttctattcgttagaatctgatcttttagattttttgtatctgtatattataattccaatagtaatcataataataacccaaataatagctgatataatatacactattctattattcttctttgttttcgcaggaagaattttgtgtattattgtatgtatttttgaggatacagttgcactgctgctgatatttccttcaatagtaaattcaatcttcttttcagccttatttccatattgatctttaacagaaattactaattcatgctttccagaagaggatatctcatctcctatgttgtaaggatttccgtctaaagttatctttgtataggaatctacaacatcttttgaaaaggatattctaggaattacagaatgatcataagtctttccattttcaatctcagaaacatatatttctggtggagtagcctttatgaagaagttataagcttcttttgttatatttccagccttgtccactgcttctacaaggagtatatgttttccatcctgatttataaaaccgccatgataatcttgaccatcaagaagtaatatagacataagctcattaggatcatttatatatacataagggtttaaaaagtagttaaagaaaccattgtttgcgagtcctttaatagaaatgctaggagcagtcttatctataaagaagttcaaaatttttcgtgacatattgtttgctttatctgaagactctataagaagttgatagcttccgtcctgtgtaattggctgagcgttatattcagcaccatttaaaaacattttaaaggaagacagattaacgtctgtgcttgatgctataggagaaacagatgaattataataatagttatcagacacattagaaatatttatctgtggagctatagtatctactatgaatttcaagtaagatatttcacttaagtttccggccttatcctttgcttgagcttcaacctcatatgtaccatctgaaaaagcaggcaaatcatcaaaagaataagctgatccgtttataagtaattttgatataaaatcatcagcatttgtagtctttgccgtaggtttaaaaggtgtattaaaatactggccattggtaaagttaaagtttaaagaaggagctgttttatcaatactaaagcttataggctcagaggtagtggtatttccaactttgtcataagcagttactgtaaaagaataagttccttcattagtaacttcaaaagaaaatgaaccatcctcattttgagataattgtacaggtaaaacagaatcatttctagttacattaacagttgttttactagcatcaagatcagcatcgttaatgcttatcttaggtattacgtttgtatttacacaactattattagtaatacctgaaatgcttatttttggtgcagtattatcaatagtaaatgatcttgaaaaagtagtagagtttccagcatcatcaactacttttacagatatactgtagtttccatcttctgaaagaggttttcctaggaaggttatgctcccatctgcattttgagtaggagtaccatcgtaagggtttccattaagttttatatcataacttgcaatgtggtagttatcacctaattttataacaggatctacctctccggagtatataccggaatcatctatagtacgtccatttttatcttcaaaactaatagatggtgggtttgtgtctattataaaatcaactgaagaacttttttgtgcttgatttccagtagcaattgtattggctgtagaataaacagtaagagtactcttttggccatttggtgtattatctcctattgtatcacctttaagtgttaatacatttccatctttacttataaaactaagcttatatggttgtccatttaatgttgcatatatggatttaccttgaccaacatcagcctctgttaaaagggggttgttaatttttattatagggtctatcgtgctgttaaaaactgaattgctggatatattagttatataaggagtgccatcaataggtgcatcctgagcggaattagtagtgttttgaacagcattagtatcagcagcttttacagaatgatacgaaaaggctgctgatattataagagccgacaaaatcactgaagtaattttcttataattcaatgttttacctcccttggtgaatttttaatttaaatcactagattatacaataaatcaaaacaaaaaaaaattcaactaaattatacaaaaatttaataaaaaatttaagttaatcaacttttaggttaaaaaactagaatgttatggtgaaaagtgatatcataatagtgaaaaattttcacggggtgttttgtttgaatttagtaaatgagatatttgaaaataaatataaaattatagatattcttggcaaaggtggtatgagtactgtatatttggccaaggacattaagcttcagaagttttgggcaataaaagaagtatctaataatataaacgatacttcaaagttaaaagtagaccttctagcagaaaccaatatacttaaaaagttagatcatcctgcactacctagaatagtagatattattaaaagagatgaaagtctatacatagtaatggattttatagatggtgtatctttggacaagtttattcacaagaatggtgctatcaatgaaaaggttgtattagattgggcaaagcagatatgtgatgttttaagctatttacattctcaaaaacctaatccaataatatatagagatatgaaacctggaaatttgatgcttacacaaaatggaaagataaaacttatagattttggaattgcacgtgaatataaaaaagaggtttccaaagatacaacgtacataggaacaagaggatatgctgctcctgaacaatacggagattgtcagagtgacgctagaacggacatatacagttttggtgttactttatatcatatgcttacaggtaagggaccaaacgatcctccctttgaacttaaaccagtacgtgaacttaattcatctctttcagaaggaatagaacatataatagaaaaaagtacaagacaagatccgagcttaagatatcaaaatgtagatgaaatgctttatgatatcaaaaatatacataagttaaattctaagtacaaaaaacagcttgtaaaaaaatacattaaagttgcagcaagcgcttgtttatttatattttctgtatttcttataatttcaggagttttaggcataaagagcgatagtgctaatgaatacaataatataattgaaaatggaagcaagcaaaatggggataaggctgtggaatattttaagcaggctgtggataaaaactctagcaatccaaaagcttacataaaaattatagatacgtacttagaaaatggagaatatgatcaaagtatagactttattgaaacaaatttaaataataagcaatcggaattacttaaggacaatgaacttttatttaagataggaatggcctattttgatgacgaaagttatgctaaagcctaccaatattttaacaaaataaaaggtgcagatatcagcataagtgagcctttgaaatattataagcctgttgcaaatgcattatcaaaagtggatttgcaaaacaaagataaaattgtaagttcaattacgcagcttgaaaaatacatagattcaagaagtgatgttgattataaggtagaatcttatataacattggcggaattgtacagagataatccacagatatttcctcaaaatacggataaggaaataggagtacttgaaaaagcaagttctgtttctgctaataaaaacaatgctatattatatggacagctaggacaggcttactttgataaggcaagcgaaagtaaaatagagcaggataagtacaatttctacttaaataaagccctagatagttacaaaaattctatacaaatgggaagtaaaatatcaaacacatattgtaagttagggcttatatacaagtatttaggtaatacggctgaaagtaagaatacctttcagaaagaaactcagctattcagtgacgattataagggatacatggagatggcgcttctggaatatgattcacagcaaagtgcagctcctgaaactcgtaattatagtgaatttgttaagtattataacagtactgtttcaaagaaatacaatgaaaatgatgtcgattttatgacattaaagcaggaatacaatgatttaaagaaccaaggcgttataaaataggaggatataaatggaccctaaagttatagatattattaaaataattattggtattttaggtgttgcagccagtatagtgtttttatatttttccattattcataactatcaaagcaaggaagaagaaacaattgaagtacctgatattaatgaagatgtaaaaagttataaagaagttgatggattggatacggttatattaaataatccagatgatacatttgtaattgacaaaagagagaaggacgatagcacagtttgtttatgatatgggaggaaaaaagcgtatatgattgattatagtgatataaacctttcagatgagatagtggagaggaaggttgctgtattaaactttggaaattctattaaaattgacgagtatgaagttcaaagattaaatattgaagagccaagtttgatttcaatggaattaaagaatacagatattttatatgatgttacaggtaaagccaatctagaagaatatcttaaaaaaggtaaaattgcatcaggtaagttttgcaatatactcttaaaagtgctagaaagcctgaaagatatagatcatgcttcattaaaatcaggaactattcctgtggaagctaagtttatgtatatagatgaaaagaaaagcagcatattttttatttatgttccagctaatagtattgaggaatttaatttagagaagcagtttaaagctttggttaaaaagttaatagttgatgtagttaatattgaggataatgataattttttatttgatatattaaaggctttaaggaatgatgactttaatgtattaaaggattttattataaactacagtagtgatgaaagtaaaagccaaattaagggcaaggataaggatattaatataaacattaacataaataatccagaacctttaaaggaaggcatggtagaagtagaggttaaacaacataacaataaggatattaatgcaacaaaggcttttaagattagtcaatcaaatgaaaaacgtgtaccggaaagaaaaaatcctatagtagctagagaaaatattaatgtgaataaaaattccattgttactccaatatctgatccaagtgatttattaaagccaaggacagaattcattatggatgtgaaaaacgaagttattagtaagcctaatgtgtatgagaaaccaatggtagatagttctaaaggtaaagtaaaagaatttaagcttaagtctatattttggatagcagcaattcaaatatttgttattctactttcagtttgtgcacttattcttttaggagattataatgcactcaaagttcttcttgtatctattttagccggaatagacctaatagtaacagtacttattatattaaattttatgaagaagaaaggcaagatttcggttaatgtacacaatagaaacacggagaatatatcagataaaagaaaaaatatcacatcaaatactactaataatataaaaatgtctaaaagagagatagtttctgaaatgtcttattcaactcaattaataaatgagcagttcccatacttgcttgaaaataaaaaaggtgttgttgagaagatatttataaataaagatatttttaaaattggaagattaacaggaagcgtagattatgtaagtgataatagggctatagggaaaatgcatgcggaaataagaaagataaattcagagtattatctcatggatttagattccaaaaatggaacatttataaatgacagaagattagaaagtaatgaattatataaaatatcggaaaatgatattttaaaatttgctaatagttattatacttttaagtttaattaagaggtgaggtatgaataagtttgttttaatggcgggggcccttagtgataaaggaaattttaaaaagacaaatgaggacaatatattagttaaaattggtgaagataaaaatggtgactttggcatatttgtagtatgtgatggacttggagggctttcttcaggagaagttgcaagtaatatggcagtaatgagactaaaaagatggtgggaagaagatcttaaagggcttataaaacaaaagagagaagatcaaatagttcctatattatcaaaaatactaagggaaattaatgaaagtataatccaatacggcatgctaaatggaaagaggctgggaactactatatctttaatttttatgtataagagcatgtattacatacttcacgtaggtgacagcaggatttacagcataaaaaataaaatagttaaacttacagaagaccattcttatgttgcgtataaggtgaaaaataaaatgatgacaccagaggaagcaagggtaagtcctgagaggcacgtacttcttcaatgtttaggggttaaggatgaaatagatatatttactacacgtggcgaactcagtaataatgaaatttttatgatttgcagcgatggtttttataatgagctaaaggaagaggatatattaactcatattaaaggcaacatggactttgataatgatgcacttcaatattcggcaggtaaacttgttaatatagttaaaggtcgtggagagagcgataatatttctgtaattttagttggaataaagaaattatagaagcatggaaaaggtgaaggtttaaatgaacatgaaattacttgtatattccgataaaaaattgtatgaggttgtattaagtagtactaaggcttcagtaacaatcggaaatagaaaaagatttaaatatcatatacctaccaaagaaaaaaatcgtatcgatatgaaaattaaataccttaaaggacgatgtatactaaaaagtaaacattacataggagcagaagggcaagaggttgagattccactaaaccatggaaaggtactgcaatttgggataggcggagtaacaagcataatggtgatcgctttttctatggacaaactttcaagtgtgggtacattgtctcttaaagagaacataaagtttactattggaagaggtaaatttaatgacatagtgtttgatgatataaaggtatctgaaaaacatgctgagatttttgaagacaacggaaaatatgttcttgtagatttaaatagtacaaataaaacttatttaaatggggagatgataacaagagctatactttctgaggatgatcaaataaatatatgtggttataaaattgaatttcataaggaaagcataattgttgagggagcactaaaaaatataaaaaagcaagttggtttagaaaagcttgttaaagaatatccatttgttcaaaaagcacctagaatttatccagaggtaaagagagaggacttaaaaatagaaagtccaccaatgttaccagcgaaaccatctatatatggtcttatgacagtattgccatcgttggtgtttttcggaactatagtactaacttcgataaaatctaagactggtacttcaagtataatttttgcagcaggcacaggggtaagtggagttatatacggacttacatatattggacaaaagattgtatacaataaaaaagtcaagaaaagaaatagtaagtatatggactatgtagataaaatagataagaagctttcaaaggaagagaggaatctaagagaagttctttttaatcaaaatcctgacttggttgaaagtattggaatagtaaaaaattctgatatgaaactttggacaagaagctatggtgatgaagattttttacttcttagggtaggtcttggaaatgaggattttcctcttagaataattaaggaaggaagaaacttttttgatgaggatccactgctagatatgttggataaaataacagatcaatataacattgtagataatgttcctatttgtataccaataaagaataatggcattacagcaattataggaaatagagacaaggtagttgaaacggtaaagaatatgctacttcaaatttctataaaccatacgccagatgaggttaaggtagttgttttattcgatgaaaaagaacttaaacattgggagtgggcaaaatggctgccacacgtttgggatgacgataaaaacatgaggtttatggccaaaaataaagagcaggcacacagacttttatctaatttatatgatgtactttcagagagaaaaaatagattggatgataaaaataattatgagagctacagatttagtccacattatgtatttgtacttggttcaagagaacttatagaaaatgaagcgattttaaagtatctattaaaggttgacccagatatggagatatcaactatattcttatcagataagcttggaaatcttcctagaaactgtaacaatatagtgcagttaaatgagggagagggagtaatttataatatacaaaattcttcggaaaaatcatactttacgccagataagctagataacagaaagcttgtggaatattcaagaactatggcaccgttaagattagagaaggattcatattcaaataagttaccgaaatctatatctttatttgaagagcttgatataacaaatgtagaagaaatagattttgaaaatatttggagcaaatctgaggcatataacactttatcagcacctgtgggaataagagaaaatggagaaaagttctatctcgatttgcatcaaaaacatcatggaccgcacggtcttgtagcaggaactactggggcgggaaaaagtgagcttttggaaacattaattgcatcgctaagctttaattatagtcctgaatatgtaaacttccttttgatagattacaagggtggaagtatggcaaatatatttaagaacctgccacatgccgttggaactgttactaatttggagggaaatggatccaaaagggctatagttgcaatagatagtgagataaaaagaagggaaaaactacttacagataattcttacagtaatatagatgaatatcagaaaaattacaagtatggtaagcataaaatgtcgttacctcacttaattataatagttgatgaatttgcacagcttaagaaaaatgatcctgattttataagtcaacttgtaaatgtagcagtagttggaagaagccttggaatccatcttattcttgcaacgcaaaagcctttaggtatagtagatcctcaaatagaaacaaatactaatttaaagatttgcttaagagttcaagataatgatgatagtagaacagttattggtaaatcagatgcgtccagtataataaatccaggaagggcctatgtaaaggttggaaatgatttagtatacgaacttatacagacagcattttcaggagaaaagtataggaaaaaagcagctaaaaaagataagaatgtacttatggttgatatagatggagagagatttgacattgtggaaagagagaaggaagtacatactgaaaatgtaactcagctttccaaacttattgacgctattaaaatttattgtgatttaaatatgaattacggaagaaagcttccgtggctgccaccgcttaaagattatatatatttagatgactttaaaaatgtgccacaggataatttcaaagctagagtaggactttatgatgatccatataatcaaagccaagagatttttgaaattgatatgcaaaaagaaaatcatgttgcattatatggaatggctggaacaggtaagacaatgttcctgcaaacacttattttaagcctttgtagtaaaaattctcctgaagatataaacttttacatagcagactgtgataaaggaactttgaatatgtttaagaatctagttcatacaggagaggttgttttaagtgatgatacggacagaatgaagaaacttcttaagtttattgtaaaggaaattgatataagaaaaggtgctctaacttcaataggggctataagtatcaatgattataattataaaacagggaaagttcttcctcaaatagtttttataatagatgatattgttgcttttttagctttaaatgatgaatttagagagactattgtaaaggtagtaagggaaggaggagcgcttggagtacatgtggtttatactgcaaattcaagtaactctgtagctatgaaggtcaaagaaaatataaccttcaacatagcttatagcctaaacgatccttctgaataccgtgaaatatttggaagaaataacggaatagttcctgataagttgcaggggcgtggagttataagaaatatgaacttaattgaatttcaaactgctcttgctgtggaagctgaagagtttaattggagttctgagataggtgctaaaatagacactataaactttaattatccaaatgttaaggttaagggtataccagttttaaaggaggttcttccgctttataatttcattcatgaaaatgaattccttgaatataaagaagatgaaataatatataacagcagtattccaattggcgtaaatacagatgaaatggaaggcatatatgcagaatttctaaacattgacaacatgttaatatcaggagaaagtggctgcggtaaaactaatttcttattatcctttgtaatgacacttgcagaaacaaagggtagagagaaaaataagatttttattatagattcgcctgatggcaatatgcttgttacaagtaagcttaaatgtatagatggttactttgaaaataaagataacttagaagaatgtttgagggatataaaagaggaaatagaagaaagaaaggctgctattaaaagtttaagaatggaatatggtatgaatgccaagaaaaagattgttgaagatagaggaaatatatttttgataatagatgtcatagaagattttaaaacacgtttttcagatgaaatagcacaagaactagagtggataatggcaaatagcaaaagcacaggaattcatgtgatagtagctgatagcatggctctttttactcgtgcatgggatggaatggaaaagactataaaagcttgggaaacaggaatcatatttagtacaagcgtagattctatatttaccaatgtgaatattggttttcagtattcaaagaaaatacttgaactaggagaaggcttctttattgtaaatagaaaggcagtccctataaaaatacccacaccttttgagggaaaagtcaaatttatggattatataaataaattaaatgaaaagttgagttgaggtgttgtcatgaacaaggtaaataatattatcgtaactgttagaataaaagataaaaacagacaagcagattttgacttaccattagatgaaagccttgaaaatgtaatgaacatagtttatccttcgctgcttcaggtaaatagtgtggaggaagaaatgttaaagaataaacagttttatattaatggaaaagggctggataaggcttcaactttaagggataacgctatttgggatggaagcatcctagaaatatattaaaagaggtgttgtaaatggctttaataaaaatggcgccagaagaattggaacaattagcagcaaaattttctgcagcaagtgaagaatcacagcaaatggtcagtacattaggatcaggcatagcaaatgtacagcaaaactgggcaggtgtttctgcaacaaaattctttggtgaatatcagcagtggagtaagaccatgacaggatatgttcaattacttcaacaaatatcaaatgaattaaagggacaagcacaaaagtttagagatgcagatttaagataattaagactaagtttatagatggttgctttaagcaagcagccatcttctgaataaaagaaggggatgatttttatggctgaaaaaattaaaatgcagggagaacagttagattctgttgcttctaatcttttaaatgatgctaaaaccgtacagacagtattagataatcttcaatcaaaatatttacagattttaaatgataattgggaaggtaattctaaggataaatttgtagatgactttcaaaataatacaatgaagcttcttcaaaattgtgttaacaacttaaataatactggtaacagtcttaagcaaatagtagaaatgtttgcagaaacagatagcagttacagcagtaagacggatataaaataaggtaaacaggtaattaaaataatttgttctatagagcttacaatttaaaaaatatcacattcatacaattttacttaagatgtattttttctctgaattgaaataagggatagtagggtgactggatatggaacaacttaatataaaagaagaaaataagtatgccaaaatggcagtgaatttaaattttgtaggtaaatatgatgaggcagtaaaatattttataaaagcattacaggcaaatgaaaatgattttggtgtacttataaatatagctgcaaatttaacagttttaaaaagatatgatgaagccttagagtattatgatagggcacttaaaattaatccaatcgatgaatttgtgctatgtgaaaaagctaatattctatttacgcaagataggtttaatgaagctttaaaatactatgatgctgtgatagaaaataatcaaattaataaattagcttactataataaggctatgagctatgaaaagctaggaaaatttcatgaagctattaagagttgtgatttacttataaaattagataaaagttatatagatatatactatttaaaggcaagacttcaagaaaagtttgggaaatataaggatgcaataagtacatatagtgtaattgcaaccttaaagcaagatgatggacagccttatttgaaaatttcaagtatttataataaaataggattttataacagagctttagaatatatacaaaaaatgataaggataagtccggaaagagcaataggttatacaaataaaggattaatactaagtagtcttgaaagataccatgaagcattagaatgctttgataaagcaataaaaatagaaaatgatgatcccgatacttatatgagaaagggaaatgcatacagaaaagtgtcacaaaattataaggcgttaagctgttatgataaggccattgaaattaatgagctgttttttaaagcatatattttcaaagcagagcttcttaatgagcttaaacaatatgatgagttggctttgtgttatgaagctttaatagaaaaagataagtctaaggtgtattcagcgtatgtaaatgctccatataagttggttttaacctataaagagcttaaggactatgataaagctagatgtgcttgcagaaaggctataaattattatgaagaacttatttatttctcagatgggagtgaagagtttaaaagaataaaaggagaattaggagggatgttatatggattcaggtaatcgttacaattctagtttcatggatggtagtatgaaggtaaatgctgaggaaatccaagctatggcaaaaagatataaagaactggctgataaggcaagcactatattaaactcactaaatagtactatagatgaaatgaaacaaaattggaagggaaaatcaagtgatacttttgtaagcaattatgatggttggaagagcaatggcagaaggtatgtaaatgaaattgatagaatagcggatgaattaaaaaatgcatctgaaagatttagagaagctgatagaagataaaatttagaattatttataagataataaagcttaaaaatgattagtgtgtaatcctttttaagctttattatcttataaataaggtgggaataattataaaatatatttatgtaagttaagatattccatgaaagaaataaaataattatacgaatatatataggtgtggtaatttatcccttgatattattataataaatgataaaaaataatattaggagtctgaatgaggatttacttgaattatatggatacacctatatattaggtacacttttgttgaaatatattacaatttacttcaatgttttgttacctatggtatataaaggataaagtacatgaaaagttaacaaaaaatttaatgaaataatgaaaaaggatgaaaatatggtgaaaataaggtaaaatatatatagaaaaataaacccacaaagaatattagaaatatagtaggtgtattgataattttaagtcttatgataaattcaagttagggattaaattattgggcaaggagagggcaaatcatggatgaaatatttttgaaatctgacgaactacaaaacaacatagattatattaaaaaacttacaaatcagatgaatgatgtccaaaatgaaataaagcaatgtatcaaacagcttgacagtaatgagataagtaagagtataaaaaatattacagatgatatgtacaagaattatgaatatggtcaacaaattgtagaagaaattatgaaaattgaaagcataatgaagaatgcggtaaatatatttaatgaacttgacataaatttagggagtaatatgaataaggggagtttaaattcggcagttgccgggattttgtgggaaaaacagagttcgaggataaagacagaaatgaaaaaagattttgaggaaattgataaaagtgcattaaaaataaagaaggatacttttaaacgtgatcttccagaagcttttactagaaaacttgaaaacttttttgatgaacctaaaattcaagcaacacttacacttgttggaggaggaacacttatcacaggaggactacttaagagaaaagctttaagtaataaaataaacaccaataacggaagtgaagctctcaaatacaaaataaataattataatcaaatagatgcacatgctgaggaaacgaacttagatcagcatgaattaaaattatccagtattggaattaacttaaagaaagtgagggggttagctaaatcaggtattaagtattatcttaataaagattcagtgtctagtagagcagttaatgacactttagatgtgaaagataactatgtatacgcaaatggttctataaagaatggaaatagtagtggaataagagaagctcttaatttttcaagagagtatatgaatcttgctcgtaaaggttttggaaatggggtatcaagcattatgaaatctgtaggggatgcagatattagtaatgatgcgatgactttttttcctcaaagctcatctaagtagtaagataaattaacctataatattttatttttcctataaatcaggtatttgtgactcgaaacggaagtagaggtaaagactttatttacaactaaatactatataaaaatataaataagattgacaaaatagatacataaggtgcgtgtttaaactaagttttatttaaggagcccgtagctttttagataaaaataaaagttaattgaggtgtttatacatgaaagaaattgggataaataaagaggatagatataccgagcttgcaaataaccttaaattaatgggaaagtacgatgaggctgtagaatattataggaaagcgctggaggttgacggagataattttgaggcgtatgctaatcttggagatttgcttgataaaactaataaatgggaagaagcatgtgaggtttacggaaaggcaatagagcttcaaccagaaaatgaagtgattttaaatgaaagaggaaatatgttctttaagcttcagaagtatccagaagcacttaaatgttatagtaaggctatatactttaattataagtttgtagtgccatatcataataagggcttagtatacgaaatttttagtgaatttgatcaagctatgaaatgctataaattatccattgatattgatcctaattataaagaagcatatgtttcaaaagcacgtttagaaaaaaaattaggaaaatatgaagatgcattagaaacatataataagcttgaaaatttagagaagaataataacaagatacttttagatatgataaagattaatatcgatatgaagaattacaaagaagcattaagtgaagtagaaaagttaataaaaatatatccggaagagtcatcaggatattatattaaaggagttctagtaaattatttaggtaagagcgaggaatctttgaagttcataaataaagctttaagattagacactaaaaatcctaaaatttattatgaaaaagctcttatttatagtaatataaaaaagtatgataaagcactagaatttttagaagaaactataagtatagatccagattactatgaagcttatattttaagaattgatattttaatgaaaacaggaaaatacagtgaagccgtatactattgtagaacacttataaatagagataatacgaagatgtattcagcatatggtaaagctccatatagaatgtatttagcatataaggcaatgggtaaaaagaaagatgccgatgaaatatgtaaatatgcaattaaatattatgatgaaattatagagctaagtggctttgtacctgaattttatgtgattaagggaatattacttacacattttgacagatacaatgaagctaaagaatgttatgattatgctctagctttagattctaaatatgccgaagcgtattactatcgttcaaaatattatgaagctcaaggtatgaagctagaagcagaaaaagatatgaaaaaatgtgttgaacttgataaaagctatgaaagttatgaggaaaatataaattaggtatatttgttgaggtgtttataatggcaaatgaaaatttggataacgcggaaaaatacaagaaaatggcactaaatttaaatcttgttgacaaacatgatttagcaatagaatacttcaaaaaatctttggaatataagaaagatgattttggcgtacttataaatattgcagcaaattacactgttttaaaacaatatgaaaaagcaatagagtattatgagaggtcacttaaaattgctccaaatgatgaatttgctatgagcgaaataggaaatcttttatttcttaaggaagactttaaaggagcagcaaagcagtttgataatattgtaaagaataataaagacaataaaacagctctgtataataaagggatttcccttgaaagagctggggaatacttggaggcaattgaatgttatgatttgcttataaaactagataataagtatatggatgcttattattccaaagcaagagtacaggaggaaattggaaaacacaaagaagctataagcacatatattgcaattgcaaatttgaaaaaggatgatggagaaccgtacctaagaatttctagtatttataatagaataggcttttatgacaaagctcttatctatatagaaaaattactagaagttgatccagaaagagtaataggatatgtagacaaagcgcttattcttataagtactgaaagatataacgatgcattagaatggattaatagggctattaagatggaaaatagagaccctgagatttatactataaagggtaatttatatagaaagataaaacagtatgatgaagctataaaatggtatgatgaagcaattaaagtagataaaagcttttttaagtcatacatatttaaggctgaagttcttcttgagattaaagcttatgatgaggcgattgaaacatataaatatttgatggaaaacgacaaatctaagctttactcatccttttccaaggccccatacaaattggttttactttataaaaaactaggtgattatgatgaagttaaagccatgggggaaaaggctataaaatattatgaggaacttattagcatagctaaggaaaataatgagtttgtaggcatagttgagaacattaaagaactcatgaaattttaggacttaaaactaaatgtaaataattaacacaatgtagacactggaaataatgaattgtttatacaaatttattagttaattagcatagaaaagttaagatagtcaaggcaagatttaaattttataaatcttgcctttttaatttttatatgcttaaattataataaattaacacttaaagcagagaggaactaataaatgaatattcaaatttttggtactaaaaagtgttttgatacaaaaaaagccgagagatactttaaagagagaaaaataaaatatcagtttatagatttaaaggaaaagggattaagtaagggggaattaaatagcgttaaagcctctgtaggtttagacaatttgataaatgctaaagcaaaaaaatataaagccctaaatcttgataagattagaactgcatcagtaaaggaagaaatattattggataatccagaggtttatgtaactcctatagttagaaacggaaaaaatgctacagtaggttataaaccagaggtatggaaggaatggtcgtaggggccttgataggataatatattaaaaagtagtgaagaaacgattatagattaggcctcttcactatttttttatacattatcttaattcaagtattttcttatgaagctcgtctacactgtttacaatataattagctcctgcattttttagctcttcataggaaccaaaaccataagtaacgcctatagagggtaaattattttttaaagcacctataacatcatattccctatcaccaatcattattgcatcgtcgctttttatattaagactttccatagcatatcttattacgtcctcttttgtacttagtttaccgtcaagagaacttccgactatagcatcaaaatagaaagctaatttaaagtgttcaagtatttgttttgaaaatacagtgggctttgaggttgcaacaactaaatgaaaaccataatcttttaaagagctaagtagagcttcaattccatcgtaaaccttgttttcaaacattcctttagctttaaagtaatctctataataatcaattgcgacagttgcagtttcctcatcaaaattatagtattccataaaagatgttttaagtggtggtcctacgaatttattaagagaagataaatcttccacttgtatatcaaatttattcagggaatacttaactgactttgttattccctcggcggagtcggttaaagttccatctaaatcaaatagtacatagttatacaattaaaaaacctcctgttttgttgtataatttataatggaactaataagaaatttggggtatttatatttcttattagcaatattgtaaatgcatgttttagggattagttaatttaaatatattataacatcattaaaatgaaaagggaaagttgaggataaataggtgaaaaagaggataaatgctataataacaattttggcttttatatttttaggactatatgtttctaaatggagtattataaatgaaattaaattatttttgtacattcttgtttctttcgtagtttgcataatacttcaagaaattagttttattttaattggtcagatatatgggatagtgtctcatgttatatgtattggaccttttgccatttttaagcgtaatggcaagttaaaggttaaatttaaaatgagggcatattccggttttttgggaaatatacaaggagtacatattccagatataaaatctaaagaggaatttgaaagagttaaaaagaacttaaaaatagtactatgcgcgggattttttgctgacataattattgtaatagttgcacttattttgatttttacagcagcttttaaaaatcatgattttaaaatgtttttgattatatcaattattatggcagaacttttaggctttatttctgtttttggaggcagtgtaaagagtgctttaaatatgaaaaaatcttcagaagaggaagttctacaggacctattacttctaggtatattttatgaggggactaaagaagcacatcgttttagttatctaattgaaaggtaccttgttctcggagagaatattaaagttagaaactatagtgatgatgaaatgcttaaaaatatatcctatgtgtctgaacttatatatatgcgtctagggggcattgtaaataaggttccatcaaatattatgaaatttatacagaatataattaagaagaaagaacaatttgtggggaaaccaaggttttctagaagagtcttaaatcttgtatataggtatatattgtatcttgcagtggtagacaataataataaagatgcacttgagttatataattattttgcaaagtttttatattataatgataagaggaaaaattatactaaagtatttatagagcacatacttggaatcgaagataattatgagtatctaatggatgcaaataatcttataaaaagcaaaggtggaatgtggtttggttatggtatacacgaagtagatgtccatatgattaatctaaaaaatagttaagtggtgataatttgtgaaagaaaatataaatatattgatagaacacgaaatggaaataacacaggccttggattaacaatagctaaagaactagtagagcaaatgggacacaacatatttcaggaatttagagctggaaaacttaatataattattaaatggggttactaattgtgttagataaggagaaagtatttatgaataagaaattgagttttggtcaaaggtattcaaagcttagaagtggttacaaaattgtgatttgttttttactcatcatgatagcaattattctttttgagatattgacgcatgggtataaaagaaattatggaggacagtatccacaagaagtagcatttattttaattccaattatattatggaagtatgttgaaaaaaaatctcttcaaagtatgggatttactaagggaaagggttcaatattaagttttgtattaggcctggtttttggagcagtttctatgactgctgtttttattctactattggctactaggaacgctgtgtttttaggaaatataataaatcctaatattaccaatcaaacattaaaggatttaatattatttattttagtggggtttgctgaagagatttttttaaggggatattgtttaagaagtatttcggaaaggaataaaaaaattacagcggcaataataacatctttgttattttcggtacttcatgcattaaacccaaatgtgacagctgtgttttttgttaatgtagttttaataggaatgcttttttcatacatgacttttaaatttaatatatggcttccaataggtttccatattatgtgggattattttgaaggtaacgtatggggatttccggatagtggtatgatagttaagggaatttacaacataaagattttaggcagcaatgttattaatggtggcttagtaggaccagaaggaggactaatagtaacgtttattacgttagttggatttcttattatatttttatcaaagaataataaagctgcgtaataaaaaatgacgttaaaagtatataacgtcatttttatagttaaataaatagataatttaattttgatctaaaattttgttttttcgtaaaatacttattataattactgctatgaggcctccaattaagccggttattaactgaggaatagtcatagacttaagtaaaagtttgttaaatagatgacctttgtttccactaggtacaatatgtaacatacctactaactttgtagctgatacatctaaaaatgcaaactttagaatagcagcaactataattcctatatagcttaaaattatgtctttattcttaagtaatccgaagcaaagaatataaatagcatttcctatcattacaaaaggaataaaaggtccgagcattggatttagctgtcctagtaaggaggctaaaagaggtgtaaatactcccaccattactcctagaccagttccacaaatgaaagcagataatattaatatggcatttacagcaggtccaacaaatacctgactatctggaaagtttttacctataaattgaaatacaattgcaattgcaagaagtagagctgctcttgctagttttttagtatcatgactcatataaatcctcctataataaatattatataataattaatattcagaattatgtcctatataattataacaattagtaaagcttttttcaaaataaatataattttcttgttgacaaaaatttatgaaaatgttatcattagttcatagtattgaatacagggattgttactgttaagcaggcaaaacccagattaaagtaaatgaagtaatcatatcgtttattttaatttgggtttttatttattggtgtctttttaataatggagtgatatcatatggttataaaaaaaatactaaataatagtgcagttacgacaatagatgatgctacaagaattgaaaaagtcattatgggaaaaggaatcgcttttcaaaagaaaccaggagatatactaaacgaagaaaaaatagaaaaaatcttctccatagaaaaccaaaatgaaaatttaaagtttcaaagccttattagcgaaataccaatagagcacattaaagtatcagaaaacatcataagttatgcaaaaagaaagcttgatgtaaaatttgacgagcatatatatatatcacttacagaccatctatcttttgcatttaggagatatagtaagggtataaaaataaagaataatatgttatgggacataaagagaatttataaaaaagagtataacataggtatgtgggctgttgagtatataaaaggtgagcttggcataaaaatggacgaagatgaggctggttttatagcacttcacataatagatgcttcactaaatgaatcgatggataatactatcaatataactgagataatagatggcattttgaacataataaagtatttcttttctatagaatttaatgaagatgatatgtcttatgataggttattaactcatttgaagtattttgcccaaagagttgtttctagaaaaaatgcaatagatgaagaagaaaagagttttcttgaaattgtaaaaacaaattataaagaagcatatagatgtgtaggtaaaattaaaagttttatagagaaaaactatgattacgaggttaagggaggagagatcgtttatcttacccttcatgtacaaagagttatatcaagtttaagagataagtaaatttaatatcgaggattgttactttttagaatttatttctgttaaggcaatacctaaattaagtggtttagttgagccatttagtttaggtattttttttgtaaatttaagataaaacataaaattaggagggaaaatatatggattataacaaaacagcaaaagatatactaaagcttttgggtggagaaaaaaatgttatgagtgcagctcattgtgctacaagacttagacttgtattaaaaaatgaaaaagaagctaggactaaggaaatagaaaagctagatggggttaagggagtattttctagttcaggtcaatatcaaataataataggtcaaggaagcgttaataaggtatacaaagcttttgttgaaggtacaggtatatcagagtcaagtttaagcgatacaaaaaaagcagctatgaaaaacatgaatttatttgagagatttgccagaatgctttcaaacatatttgtaccaattataccagctatagttgcaagtggtcttttaatgggtttacttggaatgctagatgcttttcatttagtaaattctaaaagtggtttgtatgttattttaaatatgttttcaaatgcagcgtttcaatttttaccgatgataattgcatttagtgcggcaagagaatttaaaacaaacccatatttagctgcagcactaggtgctataatgatacatccagatcttcaaaatgcttggacattaggagaaggtattaagcatacaataaatatttttggacttaacataggaatggttggttatcaaggaacagtactgcctatacttatatctgtatgggttatgagttacattgaaaaaggacttagaaaaatagttccagaagcattagatattttattaactccgtttttaactttaatgataacaggcttctttgcaatggttgttataggaccaggaggaagatttgtaggtgatgagatatcattaggacttcaaactttatataatacaacgggtttcttctcaggagtattatttggtggactatattcattaattgttataactggaattcatcacagttttcatgctattgaggcaggacttcttgcaaaccctgcaatacacaagaacttccttttaccaatatggtctatggcaaatgtagctcaaggaggagctgctcttgcagtttactttaaaactagagataagaaaatgaaatcaatagcagcaccagcgtccttctcttgccttttaggtataacagagccagcaatttttggtgttaaccttagatatactaagccttttattgcaggagcactaggaggagcaataggcggaggttatatagtattcactaaagtagcaatgacagctgttggcgtaacaggaataccaggtattgcaatagtaaaacaaggttctttcttaaattatattatagccatgattttagcttttggtggagcgtttataatagctatggttcttggaataaaggaagaaattacagaagaggatttaaacaaggaaactgttaataaagatataaaagtagaagaggtagaaagtgtagtatcacctgttaatggaaaagtagttttacttaaaaatgttccagataagacttttgcagaaggtttaattggcgatggaattggagtagatccagaggatggagaagttgtttcaccaatagatggaactgtggttcatgtatttgaaactaagcatgctattgctatgaaaagtaaaaatggagttgaaatgcttattcatataggtatagatactgttaagatggaaggtaacgggtttaagagctttattaacgatggtgaagaggttaaaaaaggtgataaattaattcagtttgatcttgatttagtaaaggagaaggctgtatcaccaatagtgctaaccatagtgacaaatcatgaggatatgggatttgtaaatagcgaaaaaatagatggaaaacaattaagacagaaggacgaaattttaaagattggaataaagtaaatattcttaaagggtacaccacaaattaaattgttgtggtgtactttaataaatatttgagaggagtattaagatatgaataatgttttatgtataggagaacttttaatcgattttatatgttctgatatagatacaactctttctaaaggagaaaactttaagaagaaggcaggaggggcacctgcaaatgtaacggcagcaatttcaaagcttggaggaagtgcgtcttttttaggtaaggttgggaatgatccctttggacattttttgaaagagactttagatgaagttaaggtagatacatcaatgcttattatggataacaactcaagtactactcttgcatttgtgtcacttcaggcaaatggtgaaagagattttgtctttaataggggagcagatggtcttttaagatatgatgaaataaatttagataaagtttactcaaataaaataattcactttggttccgcaactgctttattaggtggagaaatgacagacacttacttaaagataatggaggaagcgaagaaaaggggaataattatatcctttgatccaaactacagagataatctttgggaaaacagaacagaagagtttatagctatttcacgtaagtgcattgaacttgctgattttgtgaaattaagtgacgaggaattaaaaattatatctggagagaaaaatataaaaaatggagtaaagcttttagcttcaaataacaaggttattgctgtaactttaggaaaagagggtactatgatttcaaatggagaagaagttgaaatcatagagagtataaaaataaaatctatagattctaccggagcaggagatgcatttgtgggagcatttctttataaattgtcagaggcattagaggcaagagatattttaagtgactttaataaaatcaaggaaaatgttcgctttgcaaataaggttggtgcaattgtgtgtacaaagcttggtgctataagttctcttcctagtttaagtgaagttgaaggtgattagatgaatagcttggaatttataaagaaggtaagttacattgaagaaaaatatagggataaagtagagaaggattattacagacaaaattatcatcttatgcctaaggtgggttttatgaacgatcctaacggattaatagagataaatggtgagtatcatgtgttttatcagtataatcctttttatccagatgaaaaacatgtttgttgggggcactttagaagcaaggatttaattacatgggagtgtttgccggtagctttaagccctctagaatggtatgacagtcatggttgctactcagggagtgctgtgaataagggtggaaagcttgttttaatgtatactggaaatgtaaaagatagtaagggggaaagggaaacctaccagtgtcttgcagaaagcagcgatggtgttgagtttaagaagccttatatcaatccagtaataaaaaatcagcatgaaggctatactaggcattttagagatccaaaggtttggaaacataatgataaatggtatatggtgctaggggctcaaagagaagaagaaaaaggaagtactgttttatactgctctgatgatttacaaaattggagtatagttcatgaaatattgggctctaatttaagtaaatttgattttctagggtatatgtgggaatgccctaatttatttactttagataataaggatgttttattattttgtccacagggagtggataaacaaggggatttatataataatatatatcaatgtggatacgttttaggaagtcttaattatgagacaggagagttttcttgtggtgattttttagaattagatcgtggtttcgaattttatgcacctcaagtgatgaagactagtgatggaagaacacttcttttaggttggatggggttgcctgacagagaagttagtccaacaattgataatagatggcttcattgtttgactattataagagagcttaaaatgaaagacaacaaagtagtgcaaaaacctttaagagagctaaaaaggctaagaaaaggaaaggttgagtacaagaataaaataataaaggatactgaaacaaaactagatggtataaatggagatagttttgaactcaaatgcaaatttgaatttgataaggttaatcaatttggaataaaaatgaggtataatagtcataaagatgaagaaattttgatgttttatgatgctataaatgaaaaaatagtttttgatagaagcaaggatggatttcataaagaagctgatgcagaaagaaaatgctttataaaaaataatggcaaagtaaaaatgcacatatttatggacaaatcttctgttgaaatatttataaatgatggtgaagagacttttacttcaagaatatatccaagtaaagatagcaaagatattgtattttattcaaagggtggagaagttagacttagtgtagatcactggcaaatataatatactatcagcataaagcaatataagacaggataaattactggatatttcctataattatgttgaaaggaagatggtatatgaactggataggcgatatgaataatgcacttagatatgttgaggaaaacctcgaaagaaatattgaatcaggagaagtggcaaatgctgctcatatgtcaaagttttattttttaaggatatttaaaattttgacagggatgaccctcggggactatataagagaaagaaagctaagcttagcaactaaggatatagtgtccactaatcaaaaaataatagatatatcctataaatatgggtatgagacgccggaagcctttacaaaggcatttaaaagacttaatggaatatcgccaacagaggctagaaaaagtaaaaataatttgaaagctataccaccgctatcctttcaagtaattgtaaagggagaagaaaacatgaattataagattgaaactaaaaaaagctttaaaatagcgggggtttctaagagaatctccactaaagaaggtaacaactttaagataatacctgagttttgggatgaggtaaaaaaaagtggacagtgtgaaattattgaaaaaaacgcaggaaagttaggtgtcatgggagtctgcactaattttgattgtgagtatcaagagtttgattatctaatagcagttgaaggagataagatagagggtttagataattatgtagttattgaagtgcctgaattatcatttgcagtatttgaaagtataggaccaatgcctgatgcccttcaagatgtaaccagaaggatattttcagagtggtttccagctacaaagtatgaagaagcagaaggacctgaaattgaagtttatcttccaggaaatccacaggataaagattatagagcagaaatatgggttccggtggtagaaaaaagaaaatagtaataaaaaagttcacaggtggattaaagtcctatttgtgggcttttttttatattttaacatcgtcttaactttagacagtacaaatttaataattattaagtatagtttgtaatagcttttgtagcaaatatgtttttaggaggtatagaatttgcaaagagttcaaaaacaagtccttaaaagagaacgcatattggggaataagttttctcttactagtggcaaagaggcatttttgtatatgcttccatgcctaattatatttttagcattcacgtactatccattttttaaaactatatacttgagtttttttaatatgaatgcggaaggcaaaatagcaggttttgcggggatttcaaattatttaaatttgataaagtctgaaagttttttaaacactttggttgtgacatttaagtttgtactcatgactgtagtaccatcaatttttatagggctacttatggcattgataacaaacaataagttaaagtttaaaggcctatttacaacgatgtatgctatgcctatggctgtgtcatcgtcatccgctgcaataatatggcttttacttttcaatccaagcataggaatgataaattatcttttgcgcttaaaaataaattggtttaccagttcagcatggggaattgttgctctgacaattgtaaatgtatggttgaatgctggagtgaattatatatttataaatgctggacttaaaaatattcctaaagaattatatgagagtgcatatgttgacggagcggggtattttaccatattaaaaaagataataattccttgtctttctccaactcttttctttgttactgtaataacagtaataaatacatttcaaacctttggtacagtaaatataatgacatcgggaggaccttcagagtctaccaatcttattgtattttcaatatatagaaacgctttttttaataacaagcttggcactgctagtgctgaatcagtaatattgtttttgataatgttggcagtaactttatttcagtttaagtatgagaaaagtaaggtgttttataattagcaagtttggagaggatagttttatgataaaaaagattaaaatatcaggaatttatggattaaatataatattagggcttattacaattgttccacttatttatgctctttgcgttagtttaatgcctcaagatcagatattttcttttccaccaagatttattcctaaaggtatttatttaggaaactataaagaagtacttagaagtgttccaataataaagtttatagttaatagttttattgtttcacttggggtaactgtatttcaaataataacttctagtatggcagcttttgcattttcatttttagactttaaagggaaaaaaatattattcatagccgtacttgcaacgcttatgataccagcagaaactacattgatatctaattatcttacagtaggttcattaggatggcttgatagctataaggctttaatagttccatatatgtgttcagctatgggtatatttatgatgagacagtattacttgacgattccaaaagaattgtatgaagctgctaaaatagatggatgtggaagcttcggtttttttactaagatacttatgcctgtatcaaggccagtaattgcatcttttggcatatactcttttttagtaagctggaatcaatatttatggccacttttagttactagtaaggagagttcaagaaccgtccaaataggaataagtatgcttcagttttctgagaaccaatcctttggacttattatggctggaattgtaatagttctattgccgtcaattgttatatttataattggtcaaaaacagttagttgatggaatgacttctggcgctgtaaaaggctaatatattataaaatttatttcggggggaaaaaaatgaaaagaaaaataatatctttgttactaataggagcgctttcagcaacaattttatctggttgtgctcaaagtaaggcaagtgcctctgagtcaaaaactgtacaaataactttttggcatgctatgagtggtaaaaatggtgaggctttaaacaagatggtggaggattttaataattctcatagcgatattaaagtaaaggcagaatttcagggaaagtacgacgaagagctcaataaactaaaaagcgcagaaaagggaggggaggctccagatattgttcaggtgtatgacataggtacaagatttatgatagatagcaaatgggcagagcctatacaaaactttattgataaggataaatacgatacatcaagtttggagcctaatttactagcatattatacagtaaataataaactctactccatgccttttaattcatctacaccaatactttattataacaaaagtgcattcaaggaagctgatttagaccctaataagcctccaaagactttctctgagttagaaagatattcaaaggctcttgctaaaaaggattcctcaggtaatgtaacaagatatggtttttctatggctatatatggatggctatttgagcaatatttagtaaagcaggggaagaattatgttaataatggaaatggtagaagttcagcagccacaaaggtggattttgatagtaatggaggcgggctgaaatttctaaaggaatggaaacaacttgtggattccggatatgtaggcaatttaggcagaaatgaagatgatacagaaaatgcatttattgctggaaaaacagctatgtatatagaatccactgctgaccttaagcatgatttgaattctattggaggaagatttgagcttggaacagcaccactgccttcctttgatggaactagtgacggaggagtttcaatagggggagcttctatgtggatattgaaaaataaggatgcagaaaagcaaaaggcggcttttgagtttataaaatatatggtatcatctaaacagcaggcttattggagtactgagactggatattttcctgtcactaagaaggcatatgatgaggatataatgaaggaaaacttaaagaaaagtcctcaatttaaaacagctatagatcagctttacgcatcgcctaagactgctgtaggagctcttatggctgtatttcctgaagctaggcaaactatagaagcaaatatagaggagatgcttcagaaaaaagaatcgccagaagaggctataagtaactcctcaaaacttataaatcagtccattaaagattataatgataaaaataaataggagtaaaagtatgataaaaacaacacttaatattgcacatagaggattcagtggaaagtatcctgaaaatactatggtggcatttaaaaaagcaatagaagagaaatgtgatggaatagagacggatttaaacatgactaaggatggtattcttgttgtttgtcacgatgaaaaaatagatagaacaaccaatggatgtggatatataaaagattatacctataaagaattgaaacaatttgatgcggggataggttatggtgaagaattcaaaggggagaaaatcttgtgtatagatgaattactagactatataaaagataaaaacctactattaaacttagaacttaagaacaatttgattgaatatgtggatattgagaagaaggttgtggataaaattcatgaatataaacttgaagataatataatagtgtcctcctttaatcattattcaatggttaaattaaaagaatatgacagtactatgaagataggcttgctgtattctgctaatctttacaacgttcatgaatatggaagaaagcttggagctttttcgcttcatccatattatccagcagttatgaataaagaggttgtagaaaatataaagaaagttaaaattaatataaatacttatacagtaaatgaagaagaagatatgagaaaattaatagggttaggtattgaggggataataacaaattatccagacaggttaaataaagtacttaaggaagccattaaaaattcatagcaaaaatattagataagcagtctattgtgattttataaaaagtcataataggctgttttaatttgatataatactgccaatagagtttatgctaactaaacatatttccctgaaatccattaccatgtacttcggaaatatcaagtatagacataaaagatgcaccatctgtggcttttacaagtctttttaagagtggtaactgttgagtggttacaacgcagtatacaaccattttattagatttagtataggctccttctccataaagaaaagtaactcctctatgcaaatgtttcattatattggaacttatttcgttttccttgtttgttataattagaacaagcttttgcctattaaaacctataataaccttatccattacagaataggatatatatatagaaaataaagtatatagagcactaggaagtccgaagaaaatagctcccagagtaataattaaaatatttataataagtgaagtagtgctaaattggaagttttcatgtttcttttttattgcagcagctacaatatcaagacctcctaaggagccataattgcttagaactatacccattcccagtccatttaaaaccccaccatatacgcataaaagaataggatcttttattgtgagtaagtttttaaaaggtgcagttaagttaaaagctacagaaaaggttagggtaccaagtatggtcattgcggtaaacttttttccaattaccttatagcttaaaagaaaaagaggtaaattcataattaaataagatatgccagcaggtattttgaatagatattgaagtatcaaggatataccagaaacaccgccacttagaagatgggcgtgaataagaaagagatttatacctatagaggaagtaaaacatcctattactgtataaaatatatttaaggtggtttgctttgttatttttaattttatgtcttcagacatttcttcacctctctacatattttttatatagtatgtgaggatgtacataataaaatacaaaaaataaaaaaatgtcacatgaatatcatgtgacacaggggagtagggttattattgtaataataaattaaacattaattcattatcaacaaaattcgacttaacttacataattattttagcaatatacgagcttaaagtcaagaataaatagatgtttttatatttattttataattatgctatataatttgtgaatttataatttaataaaaataatattaaaaatataaggcgaatatgtagtataaatatacaaagataagtattagtttcctcgtttattaaattaaatgtaagtaaagacactataaatttaatatgatataatttaatagaaaatgcaaaaaactatgagaataaaagggagaatgatggattatggaatcgaatgtatttagaaatttatctattgcagatgtaattgacattggatttttacagggtttccaggataacttctctgagagtatgagaattgcagctgtaactgtggacaaggatggaaaacctgttacaaagcctagtaattatataagatactgtaacaaaattcagagtaccgctaagggcgaaaaaagatgtgcggaatctcacaaaaaaggtggagaggaagcagttagaactggaaagccttatatttatgtctgtaactctggacttattgattttgcagcaccaataatggttggaggacaacacgtaggcacagtgttaggtggtcaaatactatattcaaaagatgatggagacagaatacctggtattgtaagcgatttagatctaactaaagaagagtatttagacaatttagatagtgtaaatattgtggaaaaagaaagagttagagcagcagcagatgtattatttaacgtaactaacgctctaggtacaattggctatcaaaagttgaaattacatgatgctacaaatgcttttgtggataactttcagcagatttctgccgctatggaagaactggcagcatcatcaataggtgtaactgaaaatcaagaggtactcaatcaagaaattataaatgtaaaagatgtagctagcgaaataaatgatattttaactcaaataaagagtattgcagatcaaactaagatgttaggattaaatgcagcgatagaggcagcgagagcaggagaacttggaaaaggttttggagttgtggcagcagaaatgagaaaactttctgaaagctcaaaggaaactgcaatcaaggctggtaatcttacagttcaaatagaaaagtctgttgataagacattagaggtttcaaaatctactttggatgttgcatcacagcaatcagctgctatagaggaaacaaatgctagtattgaagaagttagtagtatggctgaggaattaacaaaattagtatagattataaaaaggactttcaaaattatttgaaagtcctttttaatattatttatgaatctttaaaagttgaaagttctttttctaatttttcagaaagtttctcgagttttgatgaataatcagatacatctttcatagcggatagctgttcttctgcacttgcagcaacttcctcagttgaggcagatgtgtcatctgattttgaagatattgatgaaataagggaaattaattcatctttttcgctgtccatttcaacattagcattcttaatctctcctactactgcattcatttcaaacaaaacatctgaaatatcgttgaaaatctttttagtgtcaatagaagaactattttcttttgcaactatacttgaagcttcagaaattgctgaaacagcttcacttgaatgaagttgtatatcatttattagggattcaatttcgcctatggattcagtaacctgttctgcaagttttctcacttcctctgcaacaacagagaagccttttccagattcaccagcacgggcagcttctattgctgcatttaatgctagtagatttgtctgttcagctatttgagaaactgtttttgttatgtttcctatatcatttgaattttcatttacttttagtactatttcattaacctttgatgttgcttcaagagctttctcagattgatcattgagaatatttatagttttaagtccgttatctataagttcgttaaatgagtcagcttctacattcattacctctgttccacttaaaactctatttattttctctgataaagaagttgctttattgtaacattcttcagcattttttgcctgaatagaggctgcttttgcaatggagtcagttgctaaggctacatctgaagctgatttatcagttttatctattagattcttaagagctattgaagtttccaaaactgttttagaagaggatctgacttcaacaacaagaccttgaaccttggtagtggtttctagaaacatatcagcgatgactttaaagggtcctttaagtgatgaagttttaatggcttctccagaaaaggttccatttaaaatatctctaaaaatttgttttaagccttgtacactatttgtaattaatttaaataggctaagggaatgaactgcggatagtatacaaaaaacaacagtacatagtataatcacgtttcttatggaagagagcttgtcacttccataagaaaccgaagatagggtgcttgagcatgtgaagtatatgattgcaccatatatacacattgcaattgtacttggaagaagtgagcatagtacaaattttgtttttaaatctgaagatatttttgaatttgatttagaactcataatgaacaccaccttaaaattaattttaagccaagaattttagatgagtaagcaaatactttgacttgatattccttcgcccctacctgtaaatccaagaccttcttctgttgtagcttttatatttatacttcctaaatcaatatctaatacattgcataaactctttttaatatcttctatataaggtgaaatcttaggtttttgagctattatagtggagtcgatatttccaattttatagcctttatcctttattagtgcattaacttcctttaataattttagactggatattcctttgtatttattatcgctatcagggaatagcttgcctatgtcaccaagaccagcagcacctagtatactatcaattatagcatgaacaagtacatcggcatcagagtgacctaataacccctttgaatattgaatttctacgccgccaagaattaattttctattttcaactaatttatggacgtcataaccaattcccaccctcattcgaattctcctttgcaaaatataataataacatctatattataaatacattttgctaaaaaagaaatagttttaaaaaaatatcacttcattaatataattaagaagtgatatttttatactaaagaatacgtctattattatcaaaggtaccattatttttgggaccagtataattttttctattaaattttaaaagagcttttagggtatttaatatagtgtaaaataaattagcatttttattagttttacatttttttaaaaagtctacataaataatgttattcttcattaatatacacctactctctaagatatcgttttcaactatagtatagcatatatggctataattgttaatagttttataaatattaatttaaactatctttttgaaattaaaagtgagttttatgctagtatagattttacagttattttttcataaaataatgttataattagtatcggcattattttataaattataatatgttaaataaaaaaattgtgataaaattgatgtttgaggaatacatattataattatgatttgaagggatgaatgaattgagtaaatttaaaaagattttacttattataataactattatagtgatagctagttgcctaatattggtgaaggattactataaaaattataaaaacgttgcttatagtaaggaagtaacacaagagagtacgggaaaagacttgaatgtaagcaataagattcctgtactcatgtatcatgatattaataatgataagaatatgaatttgatgaagattgataaaaaaagctttgaggagcaaatgaagtatttaaaggacaacaattataatacgctcacaatagaccaattttatgatagtattattaatgggaaaaaagtgcctaagaaatcagtgcttataacttttgatgatggatacgaagatcattataaaaatgcatatccagtgttgaaaaaatataatctacatgcaaccatgtttattataacggactatttggacaagggaaccctatatttaaaatcaaatgaacttaaagaaatgagcgataatggtatagacatcgaaagccatactacaaatcatccttatctggacaagctaacatatgaagagcagctaaagacccttcagaattctaaaagtaaacttgaggatatatgtaaaaagtcagttagatttgttgcgtatccttatggagcttataatacaaatacaattaaagccgataaaaaactaggttatatgatggcatttacaacaaaaggtaagtgggcagatttaaataagggtgcttatgctttaaatagaatatacatatttccacaatatgatttgaataattttaaagataggatagataatcctagctatagtcaaattgtacatcccataaaagctattgaagaagcttactacagtatattagcgtggtattagattccaaaagaattgaaatttgtataaaaattactattaaagaaactttttaaaggtttaatttaaattccatgctattaattttattttttttgaaataaaatagcgacaattataaaccttttacgacaatgttcgtcaaaaataacaatcgatatgatccctatagcacacgtttgcatgtatatgtaagaaattatgtcatattttgaaaaatagttattattgtattttattacaaatagtacgataataattattgttcatagtacataaaggggaaagtgaattttatgagttatttatttgaagagatatatagtgatgatgaaaaaatttatctagaaatctcagagctttttgataaatataatattagtcttcaaaatagaaacaaagaaacttggcttgaatgtatcaatggaattaacaaaggaataagaaatcaagaaaaggaaaaagtggttgagtgtatacttcaattcacacaaaaagacgatagaattttgaagtttattgaaaatgcgtatacgaattatgttataaaaaatattagtaacattaatcatatgaaaaaggctttagtagagctaaacgattttttttatgaggtagagagaagtataattgaaaataggacatcctatatgcataaagtaaacatacaatttatagatagaataatagatagtattccttttttagtaattataaaaaacgaaaatggtaaacatattaaggttaataaagaagcaagagaattctatggtgtaaaagaagaaatcaaaaaagataataagctagataagtataattacagtgagcttaataatttaaaaattgagtcggagagttcaaaaacattttgtgaacaagttttaaataaagataatgaggaaagaactctatacgttatagccattcctgttacaataaataataatgaaaagtttacagtgattattaaaagtgatattactaaatttcaaaataatcaaattgaaaataatggtgaaaatctgaagaatttatttaaaagtgttccagaggctatctttattcatgataatactaaggtaatttatttaaacaaagttgcaaaggagctctttggatgcgaaaaattacaggagatcattggtaaggattatactaacttaataaaaatacaaaatataagtgaagataaaaaaagcaatttaaatggtacagagtataatattaggtcagcagaaatagttagaacctgtgataatagagtattaaaagtagagtttttggttgaaaaatacctgtatagagataaagagatagagttagttgtagtatgggatatggaatataaaactaaaatggaagaactaaaaaatagaatgagtgaaaagaatgattttcttaataaagttttatattacagtaatgctaagacacaatttatggggactatatcacatgaacttagaactccgcttaacataatactaagtgctcttcaagttatggacttgtatgccaattatggtgatttagaagaaaagtgtagggtttacgaaaagtattctgttgtaatgaagcaaaatggatataggcttctaaaaatgataaataactttatggatattactcaaatagaagatggtgcaagaaaactgaactttgttcaaggtaatatagttacaatagtagaagatgttactttagcagttgctgcttttttgaaggataagggaaaaaatataatatttgatacggatgtcgaagaaaaaataatgatctttgataaagagaaaattgagagaatagtattaaatttactatctaatgcagttaagtttacgggaaaagatgctaatattagagttgcaattcatgatgttggcagcaatatacaaatatctgttgaagataatggtatgggaattcctgaagataagaaaaaaatgatatttgaaagattttttcagcttgataagacttttactcgtaaaaacgaaggaagcggtataggattgtcgatagtaaagcttttagtagaacttcatgatggaacaattgaagtgaaaagcaaggttggtattggaagtgaatttactgtaaagcttccagttagaaaatctaataagtacaagaacagttattcggatagccttataagaatgtctagcaaagataaggttaatatggagttttcggatctcttgatttaatataaggggattaaagtaagtggtaactttaatcctttttgcatattttataaaacgcatgaaaatattagatggcgctatgccaactatagtttaatatttattagtctagtttaaagttttatttagcatttcctttggacgttcaactagaaatggagctgcaaattgaaaaaccctttcatgtccacattcgctgcaggaacattcacatatatcatatggctcgtcatttataaatcctattccttcttcagatgcttcatagctaccaccacaaacttcacaaggagtattttttattatagaatactcgctttcaacgtatttcataatttcatttataaccaagttgatttccctcccataggcatttatttataaaaataataaaaaacgtgctttattacataaatttaattcttatattaaaatatttataattagaaaaatatacaaattaggtttaatttacaataccctataagtaaatgttaacactaggttaaaggaaattcaataataaatcaactaattattatttccttataagggtaatatattataatgtgcgtaataattcttgtgctataagcaaggtttgataaataaagtagggcaatggggtaatgcgcggtaatcctttaaataaagagggataaatttttaaattataccaaaaaaatattgactgacgaacagatgttctttataatactaatagaacatctgttcttaaattgccttttggaggataactatatggataaaaataatatatttttaagaataagctatacatcagaagaattaaaacaaatttgtaataatgaacttgaaaaaaacaataaaagcaatgaaaagactactattagaaatcatagaaataaatcgcaaaaatatcttattggtggaggagtttataatagaaaaggcggaactatattttttagtttaagagatatgagcgatatagaaaagattaccaacaatgacaaaccttttgttaaagattgttctatgaaatatgatgtgtttatagttcctaaatcgctataaaaattaggatgaatttgcaccagaacatagatgtaaatccacccaattcaatatacaataaattatctaacttttatggtatcaaccacatttgttattccaaaggttttagtggcttctcttactgcggattctttatcatcttggctatctacttcacccaaaaggagtgctgagccaccatttacctttcctgtaacgccaacaaagctttcatgcctgctgcaatttcttagattatcatttaaaaggtctgtaagctgtttatctgaagaactaccatccatgcttatggttatatcattttctactttttttactccttcaactttctttgaaatctcttctgcttttattttttcagctaaaacattaacacagccagataatagaacacatccatcatgtgtactaacatttatgtcatcagcagtatcgttcatagaatcatgtatataactttttattgaactttgtatagagctatcagaaaaagccattaaaataccttctttctttatttaaaaataaatatttttatgttaatattttgtccatatttacgagttaatatattattaaatgaaatgttattatgttataaaaatacgatttaggtaagttaaatcagaatggatttaaaggagattatatgaaaagattgaaacaaaaaactgttggaaatgtatatataatattaggtgcattgggaatattgtattttatagcttgtagactaaccttcgctatgtatgttaatttcatggccttttttatgattttgggaattttatgtattctatttggaattttttataaaaaacatgaaattaaagctggaagtaggctaagtaaaatagataagtgcattaaaggtatagtttgtgctatatgtgtggtgtttatttttacagaggccgtacttgtatataatggacaatctgaatataaggggaaactagattacataatagttttgggagctggtctaagaggtaaacatatgctcggaacacaatatgagagagtaaaaaaggcagcggaatatgttaaggaaaatccagatgttaagattgtagtttctggaggcaagggtaatggagaagatataagcgaggcagaggcgatgaagcagtactttttaaataaaggatttaaaaatgattctataattatggaggacaaatctaaaaatacttttgaaaatcttagaaattctaaaaaaatcttagaaaagatatcaaataaaaaggaaataagggttggagttgtaactagtagttatcatattactcgtgccaagcttttgggaaaaagagttggattaaagctttatgcaatacctgctccaataaataaattgctactacttcaatcatatactagagaattttttgctttttacaaatctataatttttgatagaggataaaataaggcggcctttcaattaagaagggtcatcttattttatttattagttttaataagctgtgttttttattagatacattaatatcatttaaagcatttacttctttattggtttctacgcttaaagatggtgttttagaggtcataataaattgggttggatagatacttgtgtgtccaactattatatagcttataccaattgcaatagatgcatataaaccaatagtacttccaaacagctctattgatattacaattgatgagattggaacatttgagcaggcagctaagaaggctaccatgcctattgcggaatagaatattaaattagaattaataagctgtgcaaaagcacttcctaaagtcgagccaataaaaagcataggagttagaattccaccgcttccaccagagcctaaggttaaggaagttgttaaggactttactaaaaacagatgaggagaagtttgggtacccataatagcatttgtaaagacatcatctccaattccaagagcttctcttgaatttgttaaggtaactaaaataataattatgattccgccaattacaccttttagtggtgggtagatttttagttttctaaataaaaattccgtagtcttaactagttttataaataatatagataaaatacccactataaaactaaaaactataacgccaataaaggcttttaattgatttttgggaacataggaaacaggaaaccttaaaggcttacctccaagatataagccagtataataactgacaaaggatgatataagggatggaagaagagttatgtaagataacttgcctatgtatagaacttcgcatgcaaagattgctgcaccaatgggagcattaaatacagatacaaaacctgcgcttattccacatactacaagacgtcttttatcagcaacgtccattttaatctgtgagcctaaaaatgaagatatagcacccccaatttgagttgctggaccttcaaggccaacagagccaccaaagataattgttattaaggtagttataagttttacaggtactacttttatgtccatgttacccttatcctcattgacgctttttatagctttttctgtaccatgaccttttgcagctggtaataaatttattataaggttgctaaaaaaaagtcctataggaagaagtagataatagtatttaaacttaaaagcaaagcttgtactagtattaactagcttaacaaatagggttgtaaaagatcctactaaacaccctattattatagataaaattatccatttcaaagcactgagtattaagataccttcctcagttataaatctttttaaataattcaagtaaatcacctcatattgtatttcacagtacttatattacaactttataaaaagaactacaaatttttattgtcaactttgttatataagttatggaatagacggaaacttaatatatttatatgtagttagaaccttcttaaatgtaagtaggagcttcatgatacaaattagagaatgtacgaatatttaagttaaccaatatttagtatacatttaacaatgatagtatctaaatatatttcttattataccgattaaataagtaagtatattttttggaggggatataatggggaaaaagggttttaaaaatttgaaagttagcagtggaatcataatactttttgttttagctgtattttcatctgttcttataggggcagttggttatcttaagttaaagaacgtaaatgaaaatatgcatgcaatgcaaaatattcaattacagggcgtttctagagttggtgaggcatatggatccgttggagttattcgtaacaatttgacaaagcttacagatagaaaatttgatactaaatatataaaggatatagatgctacagaagtaataattaacaaaaatataagagaagaaatatctgcacttaaggatgattcagagggaagcaaaaaagctgaaaacttaatgaatacgttttctgattatatgagcttttatgacaagcttaaaaccatgagagtagcaggtgaaaatcctaatcaagaatttattgacgccaatactaaatcaggaaataatcttcaaaatgccataaaggaattgtctcaatatcataaagatcaggcacaaataataactgaaaagtccaatgcagattttagagatgcttctattatgctttttctgataactgcttttattgtagtagtaggttcagtgttatcaatgataatattaatttcaataaaggcttctattaatgagtttacaactgtaataaatgaagtgtctcatggcgacttttctgttcaaataaatacagaaggaactaatgaatttgctattttaaataaagcgttgcataaaacaattgaatcaatttcaacaataatgcgaggagtaaaggacaatgctaaggatgtaagtaatcaatcggtttctctgtcggcggtatcggaggaaatgtcagcaacttctcaagaagtaagtagcacaattggtgaagttgctgacggttctgtaagtcaagctggtgaacttgttaatatgacagctggtataaacaagtttggagaagaaattgatagaattgtaaaaaatataaaagatgttaatacgacagcaaaacaagtaagctcaatggctaatgttagtaatggtcaattgcaggatttagtttcttctgttgaaaatatgaatggttcctttgaatcagttgtagaaaaaataaataaacttgtattaagcgtaaatcaaataaatgatataacttcactgattaatagtattgctgatcaaaccaatttacttgcgcttaatgcggctattgaagcttctagagcaggtgaagctggtaaagggtttgcggttgttgctgatgaaataagaactctagcagaacaaagcaaagattcttcatctaaaatagttaccttagtcgaagatataaataaggaaactaaaagtgtattggctactacgtcggatgttaatggaactttaagctcccaggttactgtaattgatacttcaatatcttcatttaaagaaattattgatgaaattgaaaaaataataccagaaataaatgacgtaagtgaatctatggagagtgttacaaaacaaaagagttctattattgaaaaagcggagggagcttcagccattgcagaagaaaattctgcatcttctgaggaaataagcgcatcaatagaacaaatgtcggcttcttcagttgaggtggcaaacgccgctgaaaaattatctgaaagtgctaatgttatggttggattagtagagcaatttaaattgaaataaaattaatgaatagagtggagatatgatccatttagtggataaaagataagctgttgcaaaacttttgttagttttgcaacagctgttttattaagttaaagtttctttatctataagcttttgagttttatgtgaaaatactattttaagaagtataggagttattacggttgttaaaataacaacaatcaaagtaggtaaaaatatttcttctgatattattttagcttgaagtcctatattagcagttattatagcaacttcacctcttgaaaccattccaactcctatttgaagagcctcacttttcttgaatttaagtgtaagtgcagaggcactacagcctaatatttttcctattacagcaattataaacataattaaggttattaataaaacttcaaaatttaatcccttaacgctggcagatataccaactgatgcaaagaatattggtgataagaaggaagttgatataattttgactctcttctcaatgtattctttatgggttattggtgacagcacaagtccgcaaatataagctccagttattgcagctattccaagtttttcagcagtaaacgcacaaattagggcagctgctattgagaaaattgcaagtcctttttgaggtttgaatttttgtgttaatttatctataggtttaggtaagaaggctatagctaaaagtgaaactaagcagaatattcctatgtatataaaggtcataaaaatggatgagccatgagattttgttccacctgagattgcaagtacgactgtgattaatattaagcctaaaacatcgtcaattatagctgctcccagtatattaatgcctgagcgtgtgtttagttttcctagctctgtaagggtttgaacagaaatacttacactggttgcagttaatataacacctacaaataagttttcatagaaatttgagaagaacatataagcagataaagttcctacaattaaaggaattattatgcctcctaatgcaataagaaatgagctttttccagctttttttagttcatctaaatttgtttcaattccagccaagaacataaggaatacaacacctaaatcagatagaagctttatgtccgcatttgcttgaattaagtttaaaatgaaaggacctaggattactccagcaattagttctccaagtactcctggcatcttaaaatgtatgctaattagagaacctattttagtaaaaatgagtattagagcaatatcaaataaaattttatccaaaaatcacacctccaaataatattttgtacgcaaaaaaggtaggatattcctcttttaaggaatttcccaccccagaaattcaaagctcttgaaaacaaatataaatttgctcaaccgaaatgttaaaatattttatttaatataatcataacagattaattgatgtatatcaatatttaattcgttataaagaaaaatgcaaacaataaaataaaaagttgacatatgtgcaaacaaaaatatataatgtctatataaaatataaaaggagagtaaagaatggatatttcagagatgttttggacttcaagtgttgacgatataaaaagaggatatgtatatgataaaaagaaggagctatatatatgtcttatatgtggtaagacctacgaaaatggggtaatatataagcgggctgagaatttatatgatgcaaataaatatatgcaaattcatataaagaacaatcacaagtctgtttttgattatcttataaatatgagtaaggcatatacaggaataacagatatgcagaagcagtttttaatgctttatgaaagtggcctttcggataaagaaatagctgaaaagatgatgacaagtaattcaactgttagaaattatagatttaagcttaaggagaaagaaaagcaagctaaggtatttatggctattatggatataatggaggaaaacagaaataaaggtgatgaggataagcttgttggaattcataagagtgtaacaatgagcgatgatagattttcaataacagaggaagaggaaaggaatataataaagaattgtttcgataaaaataatcatcttaaagattttccagcaaaggaaaagaaaaagataattgtgcttaaacacatattgaagaattttaaaaatgaagaacagtatacagaaaagcaagttaatttaataattaaaagaatatatgatgattatgcaactgtaagaagagctttaatagaatatggctttatggatagaagagatgattgtagtgcatattgggttaaaaattagtaaatgaggaggtagtatggaagaagaatttttagatatatttgatgaagaagaaaggttaattggaagaaagagcagaaaagaagtacatgaaaaaggatattggcatagtacatttcactgctgggttgtaaaaagggagggaaaaaaaaccttccttatttttcagaaaaggcatccattaaaagatacagcaccaaatatgtttgatgtaagttcagctgggcatataaaaagtggagaaagtattgaagatggggtaagagaattaaaagaggagcttggaatagatgcaaaaccaaatgaactaataaatataggaataataaaagaagaatttcacattggtaagaatatagatagggaattctgtcatatatatatttatagcaataaagctgaaattgaaagttatactctgcagagggatgaggttgtagggcttgtcaaaatagaaatagatgaattagcaaggttcttagataataaaatagatggtgtttttgcagaaggctttattgtaaatcaggaaggaagaagatataaactaagtaaaattctaaataaggatgattttgttccgcataagtatggatattacaaaatagtgttacgggctctaatggatgattattgatattgacattcaatatcgattataatacaatagattctagaaataagctgtagttattaaacgaatgcggaggtattttaaatatgagtttatatgatttaaaacctaatgaaaaaggtagaataaaggatattaaaggtgatgaaagattatcaaagaggttaagtgctttaggttttatagaaggtactgaagtagaagttaaaatgatggctccactgggggaccctatacttgtgaacgttagagggtttaatatagctattagaaagaatgacgctaaaaatatttttcttaaggaggctaagtaatggttacagctgcacttatcggcaatcccaatgtgggtaaaacgtctttatttaatgtgcttacaggttcaaatcaatatgttgggaattgggcaggcgtaacagttgaaaaaaaagaaggttatctggagaagaacattaagatcgttgacttaccaggaatatatgcaatggatacttattcaaatgaggaaaaggtgtccaaggaatttttaaaaaacggagatgtagatataattataaacatagttgatgctgcaaatttagatagaaatttatatcttacaatgcagcttaaggaatttaaaaagccaatcgtacttcttttaaatatgatagatgttgcagagaagaagggtttcaaaattgactttgataaattatcaagagaacttaatattagaattatacctatagtagcttcaaaaaataaaaatatagatgaagttaaagaaatactaaaaaatgaggatttttcaaaatttgaagatgataataaatatcatttttcctctgaaaaggaaacttacgaatttattgaaggtattttaagaaaatctgtaaaacaaatttatgaaacagtaaattcacctacagaaatactagataaaatatttcttaatagatttttagcatatccagtatttgcacttataatatttttaatatttaaatttactttctcatgggttggagcaccacttcaggatttagcaaccaacttagtggatgacagtgtgataccatacttacataaaatactgggttttacaagtccttggtttagttcctttttaatagatggagtttttggaggagttatctcggttgttgtatttttacctataatacttactttgtttttctgtatttctatactagaggatagtggatatatggcaagagcagcgtttttaatggacaagttgatgagaaaaatggggctttcgggaaaggcatttataccactggtaatgggatttggttgtagtgttcctgcaataatgtctgctagaactcttgaaagtgaaaaagatagaaaattaacagcattacttgttccgtttatgtcttgtaatgcgagacttcctatatacgctcttatgacagcagcattttttcctaaaaatcaaggtttggctataggatccttatatttacttggaattataattgcgtttattataggaaagtgtcttaaaaacacattatttaaaaaaggtgaagagcctcttgtaatagagcttccagagtataagtttccagaacctaaaaatttatttttacatacatgggacaagggaaagggtttcttgaaaaaagcaggaactataatattctctatatctgttataatatgggcattatctcactttggttttggtggtatggttgatataaaatacagctttttatcatatattggtcgtgttttagttccatttttcagaccacttggttttggaacttggcaaaattctgtagcacttttaagtggacttgcagcaaaagaggttgtactaagtacaatgggagtaatttacggagcaaacttaacaagagttttgccaacattgttttcaccacttactgcatatgtatttttagtttttgtacttttatatccaccatgtatttcggcacttggaacaatgaaaaaagagtacggaataaaaatgacacttttttcaattgtttttcaaatatgtacggcttggatagtatgctttataatctataatgtgggtattttattaatataatgaatatatttttgaattaagcaaactataatgtaaggttttaaaatcttatattatagtttttttagtaggtgaagaaaatgttagttatttatcatgatgttggaggggctcattctacagcagtggcagctaatatacacataaataaactgccaattgatagagtgccgaaaaaagaggaactgcttaaactcaaaacttttgacaaagtagataaaggaaatatggggcatcttatttacataggggaagatgagtataaatcaaaaatatatactattggcaggcagtactcggctaatcttgtaataccagccattgaagatatgtacactatcttgaaaaaaaataatgaagagctaatgataattgatactaaaccaactgttaacatacttatgaaaataggaggatttacatcaagaagactacatttagtaagcataggaaggcctattgtgacatatggaagtcttaaagcttatatggagatagcaggtatagttagaggtgtaaagaataatttaaaagaaatgataagtaattagtacataatgtgactggatttattccagtttttttattgcagtaaagtaagtacttgataccagtaataaattatattagtattgtagatgtaaatagttaattttaaaggagataattatatggccaagatacttcttgttgaagatgatgaagcactttccatgggaataaaatatactcttttgagtgaaaagtttgaagttatagcaacaagtagcatagaagaagcaaaagaagtatttaacaatgaaaaaatttcacttgtattaatggatttaatgcttccagatggtagtggatacgatttgtgtagagaactaagaaaaaattcagatattccaataatatttttgacagcctgcgacgaagaagtaaatgtagttatgggatttgatttaggagcagatgattacataacaaaaccatttaagataaaagagcttatatcaagaattaaagctgttttaagaaggtgttcaagtagagaggaagtttcagaattaaaatctagagatgttcttattgataaaagaacgcttaaagcatataaaaatgataaagaaatagtgcttacacacatggaattaaaactcttaattttgttcatcgaaaactcaggacaaacccttaagagaaatttgatacttcaaagactgtgggatatttcagaagaatttgtggatgataatacactttcagtttacataaaacgtttgagggaaaagcttaaagaagattcgaaaaatccttacatagtaacagtaaggggaataggatatagatggaatggaggaggaatttaagtgaaggatattcttaaaaatccagagattatgaaggtactgcagcttaattttatagttgcagtaatattttcgcttgtactttatatttttttagatagaatggctattaatgcaaataatggacttataaaaactaatggagcggcgatggaaactttaatagaagcacatccagatatgaaggatgaagtagtaagagcatttactaaaaaaccaactaaggaaatgttagaaaagggtattgaattatcaaaccaatatggatttgatcaaagtgaatataatctaaacatatctttaaaaacctttcataatcaacttataattctaacgttttctatttttatcctgtattttttatttaatgtacttttaattagcagtcaatttggaagtgtatttatgaaaataaatgaagtacatgaaggtgcacaaaaaataataaatggtaactattctttaagacttaatgattatagagagggagagcttgggaagctgagtgcttcatttaatagaatgagctcaataatagaaaataccctaaacaatttaaaggaagaaaagatttttctcaagaatatgatgcaagatatatcacatcaattaaaaacacctctttcatcacttaaaatttttaatgagctgcttttaaatcaaaatattaaagatgaggatactatggatgagtttttacacgaaagtaaaaaacagcttgataaaatggaatggttaataataaaccttttaaaaatggcaagattagatgctggagctatagattttaaaaatgaaaaaagatcaatagaagaaactgtatgtgagagtataagtcttttaaagccaatgtatacattgaaaaatcagaaggttagtgttgaaagtacagataaggcatacttcaagcatgataaaaaatggcttctcgaagcttttagtaacataataaagaattgtattgagcatacaggagataatggtgagataaagattcatgtgtataggtctcctattatggttaaggtaacaattgaagataatgggtcaggaatatctaaggatgatttgcctcatatatttgaaagattttataaaggtaagggagtttataataaaagtagtacaggaataggtttatctatggcaaagagtataatagaaaatcagggtggatttatcactgttaaaagtgccgttagtgcaggtactatttttaatatagtttttctatatgaacaacaaaaataaggagccacttagggctccaaaggtacattaaattttaagctgtttgattattagtttttggtttgaaaaagtattttgcagaagcaaaaattatatataaataaaatattatttgtattataaatacagatgtgatttttactccagccgcataacctataatataagttaagaaggtagctccacagttattaaaaatatttataatagccgaagctgatggaacatcacttgaaggaacatgctgtattatataaccttgaatagcaggatatataacagatattgtaagccctataattcctacaccaactaaagcaaaataactattcacctttgatagtattataaatattccggcaatggatattattggtgaaatacataaaaatctaagatgtccgattttatcgagaattttatcaccaaaagctcttccaagagtaaatagaatccagaaggctagtaaaatatttggtacgtcagccttgcttacgctatagtatttttctaaaaaagtacctgtccaattaattggtagttgaaatctcagcaccaacatagaaaaatatagctatcgacataataagtactaggggattttttaatactgaaattgatacatgtgagctttctgaagaatcatcattatgtattgaaattccctttaatctagtagctagtagaaaaaacacacatattgttacaatgtgtactaaatatacgtaatgaaagcttattttattctttaaaaagaatttactaattggtaaaatcaaaatcccgccaagaccaaaaaaggcattataaaggccaaatttttgatactgctttggtaaaactgatattatggtactgcatataagagatcccattccaactgcaaatccagagaaaaaatagcctacaagtagtagatagaaggaatttgaaaataaaattattaagcttgctatgagtataaaagaaaaacctagataaaggcctttttttaaatctagtttagccattaattttgcaccaagtatactcattacaaaagaagcaagatatacggtaggtggtagtattgcaatcatagtgtctgaaacaccataagtgttttttatggtggttataaagggggataaggtgttagaaaatagtgatagaaaaaatgcacccataaaagctataagcatgtttctgaaatttttgttcatgatttcgaatgtgtaaaatttataaagttaaaacacccgcgttctaaaaattttacacatatcctcctctcaagtttttgttttaaatatttgcattaaacctagttattctaggggttcaagctagatattaaaatttaatacaaaataattgctatagatcatagcaatttgctagggcgtttttattttatcacataagtatgaggaaaccaagaataaaataaggcaagactttgattttaaaacattatagaatgtgcaaagtagatttttgccttaataaaaagtaagaatatactacatgaaaaattaagattagtctagtaaaatttatggtatagtgaaattagagttatacaattttgaagttgtttttgagaatttggagtttggagggaaaacatggatatagcagttgttgaaggactttgtaaagtttatgggaagaatgctgcgagagttgatgcattaataaatataaatttaaaaataaaaaagggtcaatttactgcagttgtgggtccaagtgggtcaggtaaaagtacgcttttgcatatgattggtggattagacaaacctactttaggcaaggtaattgtagatgggagcgatatatattcacttaatgaaaagaagctttctgtatttagaagaagaaagataggtgtggtatttcaatattataatctaatacctgttttaactgtagaggaaaatataaagttgccacttttattagataatgtagaacctgatcagaagtatattgatgaacttattgaaatattgaatttaaaggataaaaggaatcattttcctgaggagctttctggagggcaacagcagagaaccgccataggacgagcactgtcttacaagccttcaataatacttgcggacgagcctacaggaaatcttgatactaaaaatagtagagcagtagcagagttacttagattttctgtggaaaaattcaatcaaaccctgataatggtaactcatgatatgaatatagcttcttcagcagacaggattataaagatggaagatggcaaggtggctagtgatgaggtgatacgtggatgaatatatctaagattcttgccttgagatatattaagcgacaaaagagaagaactattataacaattcttggtatagttctttcagttgctctttttactgctataggtacaatgcttgccagcttgcagcactatcaaacatcacgtgaattagatattaatggaggctatgaagttcaatatagtggaattaccttaaaggatatagcttatcttaatagtaattacaatgttaataaggttggtacaagtattagtgttggaaatgcttttcttaacaaggatgaagcaaaacggtatatttcaggtgacactaatataagagcatatacagtatattattacgatagtgaagcgttaaaaatcaacaatatgaaattgaaaaaagggacatttccaaaggataataagcatgttgtgttaactaaaatgtttaataagcttgggtataaggttaacgataagataaaaatatatgtgcttacaaatgggggaggagatcttaaggagaaggaatttattatttcaggattcctagattataactataatactatcttatttcctaaagaagtagcagaaaaacttacgcctatagacaaaaaatacatttcttttgtaaatatgaagaaaggtgttaattataataaaagctttagaactatagaaaaacaaattaagtgtgaagatgtaatgtataattatggtcttttagaacttgagggtaattataataacaaagctagcatctatggaatggcatttgttatgtttatattaggagtagttatattggtatcatctgcacttgttgtatatagcgcatttaatatatctatatttgagagagtaaaggaatttggtatattaaggtctgttggtgcttcgaattatcaaataaaaagtgtaatatttatagaagcttttataatgataattcttggaatacctcttggagttctatgcggtatagcagcaataaaaattctttttttaattgttactcttagtaaattttctatgtttgttgatattaatatatatatatcttcaagagttattgtttcaagtataatttttggagttctatgcataattttctcctcaattgttccagttataaaaagtggcggaattaatcctatagaagcaataagaggaaccggaaaaacaaaggctttaaataaaagaagctattttaatataataaagaaaattaattttcaaacattcctgacttttagaaatataaagagaaataagggaaggtttaggttagttgtttcatcagttgcagttagtgtagtgatttttattgtatttaatagttttatgtttttattatttcaatttatgaaggggcctttatatataaaggattttaatataagttcaagggatattacctttaagaaggaagatatttatgctataaaggatattaagggagtaaaagatgtatatccaatggaagagacaagtagattgatattttgtccttttaataggttatccaaggagtttaagcaggcaaataaaaaattagaacataaagatggatatttttggagcggagcggatatttattttgctggttatgatttaaatgagcttaatgaggtaaaggattatgtaatcaagggaaaaatcgacattgaaaagcttaatagtggtgaagaagttttagcatttgagaaaataaaatataggggtgtaggagaggagattaatgaaacaaatttaaacattggtgatgaaatttatattgataacaacagagtctatggtaaggctgatcctgctaaagcctcaaaacttaaatttaataaattgaagaaggtaaaggtaggagctatagtaagcaaaaatctatcttactataataataactcagctatgttttttatatcttctacagaagggtataaaaatataattggacacgatagctttgatgaatttcaagtagaagtggataaaggagctaataaagaagaggttagaaaaaaaatagatagtaagcttgcagttaattataagtatatattacaagatgaagaagaaattgaatcgcaatacaagcaatataaaatagaaactatagttctagtttatgggtttatagcagttatatctttaataggtatactgaatgtaataaatactgtaaatacaaatttgatgctcagattaaaggaatttgcatgtctcatatcagttgggatgagtatacatgatttgaagaaaatgttattaaccgaagggattctatatggtgcttatggagtattttatggattgttagttggaagtggtctgtattatttaatttataaagaaatgatgaatactagtgtcgttagatggagtttgtttattaaagaaattgcagtagctactattggtgtcattgtaataatatttatttcaatgatatttccattaaaaagaattcaaaagatgaatataatagaaaatatgagaggggatgaatgacaagttaaagattttaacttgtcattttaagtattatccttcttataaatatttagttttaggagataatatttacatacagtgtactaagaaatttgagggggataactttatgaatcagggtcaagcacaattctcaagctatattttagaaagagtaacagaagataaggtagaagaggcaaaggcattacttgcagataattttgaaaaacaagaaaagggtacttttacacagaaggatgcagcaaaatttaattcgaaaatagttatattattaaaacctgacaaagtaaaagaagtgcaagaggttataaaaaaatttgctgagaattttaaagagtaattaaaaaatctaacacgcttttaaaagcatgttagatttaattacaatatgaaattttcttatgaatttaaactaaaagtttcgcttattagtgaatctgtactaatgaggcattctgctttaggaaccgagatatcagaaccttcttttaggacatcttcgatagttttaacaggtataatttgtaggctttcttttacctcatcgggtatatcctttaagtcgtctatattatcattagggattaaaacttttttaattccagctctttctgcagctattagtttttctttaagtcctcctataggaagtacagcacctcttaggcttatttcacctgtcattgcgagctttggatttatgctctttcctgtgacaagagaagataaagctgtgaacattgtaataccagcagatggaccatcttttggaactgatcctgaaggaacgtgaatgtgaatatccttttccttaaaattaaaatcagttaaaggcaaccttgattttactaaacttagagcaattctagcagattccttcattacatctcctaattggcctgttaatataatttgtccacttcctggcattgcggctgcttctatgaagagaatttctcctcctacttgtgtccaagcaagccctgttacaactcctggtggattatagtcttgagctttgtcatggcttgaaacatgtcttcctaaaatttctttcatatcatcatcagttatgttaaaggaggaggagatttcacctaaaactattttttcagatgcagctctagctagttttgccaattgttttttcaaacctcttacaccagcttcaagagtgtagtcacttattagcttttctaaaatactatcagcaacctgtagttgtttttcttcaagaccatgttctgaaatgacttcaggaagaagatggtcttttgctatatggaatttttccttagcagtatagcttgatatttgtattacttccattctgtcaagtagaggacgcggtatagtgtctaaagagtttgcagtagctatgaaaaatacgtcagacaaatcataaggtaaatcaagatagtgatctgtaaaggtattgttttgctcagggtctagaacttcaagaagagcacttgcaggatcaccattatagcttgaagaaagtttatcaacttcatctagaaccataactggatttttttcttgagccttttttataccttctattattcttccaggaagagctccaacataggttcttctatgacctcttatttcagcttcatcctttactccacctaagcttaaacgtatatattttctttttaaaacctcagctatacttttaccaagacttgttttacctgttccaggaggtccaactaagagcaatattgagccctttttatctttttttagcttcataacagctagatgttgtattattctcttttttactttttcaagaccatagtgtcttttatcgagtatttcctttgcggtttttaaatctatttcatctacttctttggttttccaaggtaattttataagtagatcaatgtaatttcttattatattataatctgaactatttggattttgtgtttcaagtttacttaattcatcaagagcaacctcttttatatcattaggcatgtctgaatcttcaattaaagctttgtaatctttcttatttttagagcttgaattaagctcgtcgtttatagttttaagctgttctctaagtatagtttctctataatttttacttgatttctcagatagcttttcagtaacttcaagctgaaattttatagattctcttcttttaattaagtgatctaagaatctaaggcttctagatttaagtgattgaagctgtattaactcgtatttttcttcaattgaaagtggcataaattgagttaaatatccaattactttatttagattagatagcttatcgactttttttgtgtataaatctgattctgtaaagtttttgcttatttcatgaactatttcttttatatcaaatagtgttttttctatatctgcttcagaaagatcaagtatatctgaagcaagtttgtactctgcaaatatggcagtattctcgaaagttatagcagatatatttactctatcaatggccttaatattgattttgtaaccatcagatattttttctatttcagttatatcaaaaattattccaatctcataaaaatcatcttcagaaatttcatctaactttacttttttgtttagaggtaatgctatattaactatagtgtcatcatttaagtagtttaacatttttttatctatattattaagtttaattgtgtaatccatatctggaagtaggttaacatcccaaataggaattacaactgccgtgtttttattttccatattattatcctttctgaaacatattaagtgaatgttcgtttaataatcttcaaaagcgtttaacttaactatataatcaaagcatcttgaagaattttaattatttctctaagtaaaattattttctcgcttatgtctaaacaatgattaattgctatagacttaacgggggaaaaaatagtacttatgattgtatcattatgataatttcgtattatattgttttttttcatagaatctaatagagaattaatataattaagctcagttatcttctcgcaggtatttgcaagggaggggcagctagagaactgttccacaaataaaaatatttctttattatcccttatatataaataatagtttttaactaaactctctataagttcttttccagacatgctttctgaaatattattgagtaaatgatttaatatatttttagagtactcaagataaatttttcgaagcatctcgtctttattttcataatatatatacactgtagcaggagaaacatcagcttctttagctattttagatattgatgtgccgtggaatccttcttttagtataagttttacaactgcattttttatattttcctgctttttgtcatctttttttctcacttactcacctcctgcctttatcactatataataaacgaacattcacttaatgtcaagacaagaaggcctatatgaaaattaatttatgcatacactaaaatgctgatactagaagtattttggtatatgcatgaattaaaagttcaattgattttgctgcgggttctagaaattatcttctatttgttattgagtgactgtattagcagcattgtttctgtaagctatagaaaatactgtggttagaaaagcagttacaattcctgctaaaagaaaaccatatggtcctcctaaattattcattgcggcacctacaaatagatttcctattggggtagtgcctgcatttagtagggtatatatactcattacccttccgcgatatttatctgaagtattcagctgaagtattgagttacttccatttaagaaacagaggttagagaaaccagatccaagtactaatactgctgtaaaatatagatttcccgaaaatgcagccactatctgaaaaatagcacttgagaagccgacaatttttaaaagcttgaaatttaaattttttcttcttaaacccgccattttcattgtaccaaagagtgagcctacccccatagaagatagcaaaaatgtatatccatgtgatcccttgtggaggactgtttttgaaaatacaggaacaattacatcaacgttcatggcaaaggtacaaataatagccataaaaattagtgcttttaaaagaattttattttcatagatatatttaagtccttcttttatttctttaaagatattgtcgctagagatgtttgcagcgtagcttttttgttttatgaaaaacaaacctgttagcactgcggcatagcttaaaaaattaataaaaaagcaaacactcataccaaatttgcccattataatacctgctatagaaggacctattattttggctagattaaaaattgaagaatttaaggatacggcatttggaagatccttttttccaacaagctccatgaaatatgattgtctagttggcatatctagagttgtagaaagtcccccaattgttgctaaaataaaaattagtatagcagttatgtggttagtataaaccaatataaataatgccaaggcttggagcattccaacagtttgagttaagtagagtaatttcttttttggaaatctatcaacaatggcgccagaaaaaactgagaaaattaaagtgggtccaaactgaaatacactaagagaacctaaaagcaaaggggatttggttaaggtgtataaaagccaaacttcggcagttctctgaagccatgttcccattaaggaaatagattgtccgataataaagcatttaaaatctctgtgatgcagtgaagtaaaggtatttttgtttactaaaatcatattaaagcctccatgtaaagtatgtaaaggtaaatcaagctaaaactaaattataggtgtataacttaataatcgaacttgtttatacatttatgtacagcaaaaattgtgccaaataaaagataaggatttcaccagtaaaattttagaatcatgtttcaataatgaaacatgattctaaaaaatgaaactatttttttctccataaagtagttctgcctatatttaagatttctgcaactctattatgatcgttatcatatctttcgagtaaactatgtataacccttttttctgtaagttctattatctccttcatagttagattatatggaacctttaaggttagagtatcttcaattttctccttgtgtacaactttatataaaacttgcgaccagtttatggtcatactattttcaatgaagagggatattctctccatcacattactgagttcccttgtgtttccaggccaattatatgccattaagaaaggagtgatttgatttaatattttagaacgatttgaagaaaaattatgagtgttttctaaaaaatgttctgctaagatttctatatcttttccgcgttcccttaatggtggcagggtaagattgaatacattaagtctataataaagatcttctctaaaagtaccattttctatagaattaagtagatttctatttgtagagcttattattcttatatctacaggaatgattttatctccgcctatgtgcataatttccttttcttcaagaactcttaaaagctgagcctgaagaggctttgaaagttcgcctatttcatcaagaaaaatggttccattatgagcgagttcaaatagaccttgtttaccttcttttttcgcaccagtgaaagagccgccttcataaccaaaaagttcactttcaagtaaatgctcagggagggcagcacaatttattgcgacaaagggaccattctttctaggactgctattgtgtatgctttgagcaaaaagttcctttccactgccggattcaccttgaattaatattgatgaatctgtttttgaatacaaaagagcgagttttttcagctctatcatgtttttatcttgcgttaaaatatcatcaaagttatatttagctacaaaacctttctcgtgtattttttttcttattattttttctaaggtttgtattttggttacatcctcaaaggtatttacaacacctataatcttgtcctcaagtttaacaggaaattgcttggcagcaataattaatccattgaagtttttaatgattttggtttcaggctctacgttttttaatatactatctactttataattaggaataacagattgaatggacttgccaagtagcttactacccgtttttgtaaatattttatttatagagttattgtaggtaattattttcttgaattgatctgttactattattccttctccaatagcatcaagtattgctttaaaacgtgccgagcgtctaagctctatatttctaacttctatcaaattcaatgcttcttcaattgctcgccttagagattcctcaccagaatttatagtttcgccgtaaagtccttgctttatagcttcatcagtaacggtttttccgcttacgacgatttttatattttctgtttttaccttagaaattaaagtagtaatttcatcctcagatgaaaatagaaactcttttatttttactccaagcatggcttcaatttcgtgcttatcaacaatgctatgtttgtaggctattagagctagctcatttccaaaccttttggcgttgtaaactgcgcgcatagtatcgaagcgagtaaccttaatggagatagaaggtatactcactgatttctttatgtagtcgctggtggcccctctacttataatagcatcgacttcatcttgaagcccaaaggctattttactggcacgtgtaagtgaagctgtttttgtaattggtataaagtttttttctaaggctagcttaggaaataaatttaataaattttcgttttgacttattagtgctatttttagagacataaaaacaccttccataaattaattaggaaaaataagtagaccatattttacgattgaacactaaagagttatttagttgtatgtattaattccagtatatcataaaattggtttttcataatatgcttgattaatgtgagctaatttgatatataaatataaatatgataaaattaagcaaatttcattttaggaggaaataattaaatggaagcagaccctgatccagataacatgattttacaatttgttttaatagcagtacttactttagtaaatgcattcttttctgcagcagagatgtcaatagtatctcttaataaaacaagaatgaagattctttcagaggaaggaaatagaaatgctcagattttagaaaaattaattaaagaaccaactaaatttttatcaactgttcaggtaggaattaccttggcaagcttcttttcaagcgcctttgcagctacaggactttcagacatgtttggaggttatctaaagaagataaacattccatactcaagtcaagtagcactaatagtagtaacaattgttttatcttattttacgcttgtttttggagaattgtttccgaaaagaatagctcttcaaaagtcagagaaaattgctatgctagcggcgagacctatactatatgtatctaaaattactgtaccgttcgtaaaactgctttcggcgtctacaaatgttttactacgaattacaggaatgaacatgaacaaattagaagaaaaagtatctatagaggaaattaaatccatagttgaagcaggtcaagaatatggtgtaatcaatgaatccgaaaaagaaatgattgatagtatttttgagtttgatgatagaatagcagaagaggtaatgacgcctagaacagaagtgtatttaattaatatagatacacctttaaataaatatgttgatgaacttttagaaattaagtattcacgtgtacctgtatttgagggcgatagtgataatataataggaattttatatataaaggattttatagtagaagctcgtaaggttggatttgagaatgtaaatataaaaaatataatacattccccttattttgtacctgaaagaaagaatataaatgagttatttaaggaacttcaagctgctaaaaagcatatggctgtgcttatagacgagtatggtggattttctggtatagttacaatagaggacttaattgaggaagtaatgggaaacatcagtgatgaatacgatgaagatgataactacataaaaaaaattgatgagtccacatttataattaagggtattatacctataagagaactaaatgaacaattggacttagatttagatgaagagactgatgattatgacacattaggtggattacttatcaagcttataggacatattccagaagataatgaacagcagagtattaagtataaaggcatcacatttgaaataaaagaagtcaaagaaaagagaatagaaaaagttgaggttcatttacaaaaagatcttttggaataaataaattttcaaaaggattatgaagtatgagatattataaaataggtgagttaagtaaaattgtaaatttaagtattgaaacaattcgatattatgaaaaaataaggctgattcctaagccagagagatttaacaataggtataagaaatattctgaaatgtatatatacagattgaagattataataaaggcaaaaaattatggatttactttgcatgaaataagtaattttttatcagaggtatcaactagcagcattgaagacatagatctaagcagtacgattatgaataaggtgcagcaaatagaaaaagagtgcgaaagattaaactataaaaagaatcagctgttgaaatttgaggaggagataaatgatcttcaatgtcccgttttaaataggataataaatgaaaaaaatacttgactgtgtactatactccacttggtacaatttttgtaaagaacatatattgagtggagtgaggaaatgatagtaaaagcaaagtttgtaaaaggatttatcagagatgtacatccttatggttgcagaagggaagtactaaatcaaatagattattgtaagaaggctattgggtttaggggaccaaagaaggttttaattgttggagcctcatctgggtttggtcttgctactagaatttcagttgcatttggaggtccagaagctcacacaattggagtatcctatgaaacaggagctacagatagaagaataggaacagcgggatggtataataacatattttttaaagaatttgctaaaaaaaaaggattagttgcaaaaaacttcattgaggatgccttttctaatgaaaccaaagataaagttattaagtatataaaggatgaatttggtaaaatagatttatttgtttatagtttagctgcgcctaggagaaaggactataaaactggaaatgtttatacttcaagaataaaaacaattttaggagattttgagggaccgactattgatgttgaaagagacgagattactttaaaaaaggttagtagtgctagcattgaagaaattgaagaaactagaaaggtaatgggtggagaggattggcaagagtggtgtgaagagctgctttatgaagattgtttttcggataaagcaactaccatagcatactcgtatataggatccccaagaacctacaagatatatagagaaggtactataggaatagctaaaaaggatcttgaagataaggctaagcttataaatgaaaaacttaacagagttataggtggtagagcctttgtgtctgtgaataaagcattagttacaaaagcaagtgcatatattccaacttttcctctttatgcagctattttatataaggtcatgaaagaaaaaaatattcatgaaaattgtattatgcaaattgagagaatgttttctgaaaaaatatattcaaatgaaaaaatacaatttgatgacaagggaagattaaggatggacgatttagagcttagaaaagacgttcaagacgaagttgatagaatatggagtaatattactcctgaaaattttaaggaattatctgattataagggatacaaaaaagaattcatgaacttaaacggttttgatctagatggggttgattatagtaaagacctggatatagaattattaagaaaattagaaccttaaaaaggctgcacaatagagtgcagcttttttaagttgagctttgtatttttacattaactgttttttcgccagaagcggttttaagctttaagcttacagtgttattggcaccaatggtatatatagactctcttaattcgttcattgtgttaatattttttccatttacagaaagaatgatatcgcctttatttattccagcagcagcagctccgctattaggagatatattataaacatagattcctttttcaaaatttaaattaaggtagccattcatagatttatcaagtcctataattccaattacaggagttttaaattgaccagttgtctttaaacttttaagtacaggtttaactatgtttataggtacagcaaagcctataccttcagcactagttattttcgccgagtttacacctatgacatttccatttgcatctattaaaggtccaccgctgttgccgggatttatagaagcgtctgtttgaattaaatcttccatgaaaactccttcgcctgcttcaacagttctattaactgcacttactattccagaggtaacagttctttgaaagtttaatccaagtggattacctatggctattgcagtttctcctatatcaactttagaggaatcaccaagggttacggcttgaagattgtttttatctatttttataatagataaatctaagctttcattagcccataatggttttgctccaatagaacttccatcgtaaagtgaaacttttaaatctttgctagtcattccggctacgtgattatttgttagaatgtagccactgctgtcgattatcattccagagcctacaccttctttttttgtattatctctctcaatataggttgtagtaactccaacaactgagggaagaaccttctttgaagcttttgtaataggagattcaacactagtagaagcattttgagcatttgcagtatccggtgttatcttttttttattgctagcaaaagtgcatccagtaaaggaagaggttaaaagaacacttgctaggactatggataatagtttatgtgttttcataatatcgccaccaacgttttttataatattttgacacaaaattgcatatattattcttaattgtttacatgcaaaaattaatgttataaaatgattaaaaagatactgacaggagttgattataatgcaaataaatcaatttaaaattgaaatctttattcctaaagaatatgttgaaaagctaggtgataagcttagtgaagctaatgttggaaagataggcaattatgatcactgcatggctactaatattgtagaagggtattggaggccacttgaaggatcagagcctgttgagggagagataggaaaggtttgtcatagcgaagaatgtaagatagaaatgaaatgtaaacgtgaatatgtagaaaatgctttaaagattataagaaaggttcatccttatgaagaaccagttataaatgtcatacctattttaaatcaattatttgaaaacaatagataatagttaccttagagatatataagctctagtaaagccgaagagattaaaagcttttaaattgcgtttctattgatgcatataaaggctttttctctaaggacacggtgaagagtgtatacagcaaatttaagtataagtatgcgtgaaattataattttgtttcttcgtttaaattagttataaaatcataaaccttctcatcttcatatcttgaaatttttatatttccaaagctgcctctttctgacttaaagcataagaaattatttaaaatatcaaagctcagttctctattgatttttgagctgcttattattattttttgacagcaaggtttgctatttgcatcggatggaagagataacatagcaatcccccctatgtatttgctcttattcaagcttggtttaatcatagttatataagcatagccgtattctctactataaagattaaagaatacaagattatctgaaattttataggttcctttaaattcttttatgacctcacctttaatatatattctaaaaatgcaattctttttagttattcttaagtttgattcgtgaattccagacttttttcctgagtttgtaacaaaaaaatagcaaaagtaatcctgtttaaaaatatcctcaaatccggtgtcatcgtaaagcatatcttcaaaataagaagaagttaacggtatatttaaaaattcatctattgttatattatatagtttgcaaatatatagaattgtttctatagcagggaaggcatcaccagatttatatttagataataaatcttcggatactcctatttttgatgcaagttttttttgggttccttcaagttgtattaatttctttaagttatgaatgaagatgctagaggtttcatcatagattttattttttagtatttttatttcaaggttgctatctttcattttaagcctccttaaacttgattattattcaagattatattctaatattatatacaatataccatattattcaagattatgtttagattttatagaactattgagattatattttatgtgaattatatttatagataagttttgggttggaggtgtgggaaaaccaagatgtaattaacagaacatctggtgcgaatttatgaatttgagaaaagttatatatgatattaagtcaaaactgtgtgaatatgaatttcagcttaaaatatattttcaggataaaatctatggagtttatatatacaaaaatagtaatattgagggcgataaatatattgagtttatgacaattataacagatgaatttacagaaggagaaattaatttattgaaaaagatacatgataaacttaagtttaacagcaaagtaaagggtagatatgtaagcttagatgatgtaggaaaagtagatctacagatgaagccttatatctacgtagaaaatggaaagttaaaaaaaggatatatgaatatagattattttacttggtggcttgttaaaaataaagccgtgggaataaagagtccatctatagatagtctaaaattaggtgagttttagatacacttgattagaatttaacttctagaagaaggtgacgttttgaatatacaaattttattgattttaatatttaattttataattacatttataggaactctagcatattctaccagattagttggagtaaaaacaggtaagatagctatttcttttactgtattcaatatattgacgctagtatcaagaactgcggttaccttccaagaaccccttctaactaactatgctgagaaaaatctttactcaagtaatttaatagttatttttaatagtataatcttagtttccggtgcagcatcgattttgggagcagtattaataccaacctttcaaagaatgttttcaaaaggggttatgtttttttctttagaaaaatcaatcccaagacttgtagtacatagtatgacgagaagggggatttattcaatgaaacagtgcgtggtgctgccatctagaaaaagcgttgagaaatttaattatagaaaacttccaagaaggataatagtatacaactttatatccgttgcagcacttacagttggagctttagctcctatatatgcttttaaaatagttcctaatttaagagccacttgtgtaaccttatcttctgttgtgaatggtatagcgcaaatacttatgaccatttttattgatccacagatgtctattatgacagaggaggtaatggagaaaaaatgcagtgaggaagattttaagaattgtgttctagcaatggtaggaagtaaagttgctggtacctttgcagctatttttattttaattcctgcaagttttgcaattgtatttgtcgcaaaaggtgtggactttatttcaagaatttaaatgggggaaaacatgattaaagctattttaatggattctggaaaagtgttgaataaaccggctacaggtgaatggtttataccgcctaagtttttttattatgtggattgggagagattcaatacaatacctcttataaaaagaaaatcagcctttgataaggcaaataagtatataaaagaacaaaaactaattactacagaagaggaggagtacaaatgcttcctagaatattataaaatcttatcaaaagagctttatcagcttaagttaaaaaacaatgatattgaagagattacagaagatttggtttataactacagaaagtatgatttttataaagatgctatttatgaaatacctaaattaagtaagaaatataaattggctgtaatatcagatgcatggccatcacttgaaggtgtttttaaaaaggcaggacttagaaagtatttttcttcttttgtaatatcctcagtaaagggagtaacaaagccaaatgaaatgatgtataaaactgctctttcagaacttagggtattgccagaggaagctgtatttattgatgataacattagaaattgtgaaggtgcagtaaagctaggaattaaaagctttgttttaagtagaaaaagtagaatatatgcttataataagttatttaatagaagaatcaagagcattagaaacttgaagcagttagaagagattgtgtaaaacagagtggttaaaacaccctgttttatttttgtctgaatttcaaaacacattttccgttctatgattaatgtggcagaaataataattaaggttacttcatatatattatagtgaaacttagtcatgtgctatgtaagtattaggtttcaataaactataaagtaattatatggaggagaaaattgataaattatatatggtttatatttatatttgtaggtaccattgttggcgttttatctggaaatggaagtacgctttcgtcatccataataaattccaccgagagctcagtaaaattaatgatttcgcttttggggataatgtgcctttggtgtggagtaatgagaattgcagagaaaagtggacttacagacaagttgtccatagttttaagacctatattgaagatagtatttaaggatataagtaaaaacaacaatgtaatgggaccaatgattatgaacataacttcaaatatgcttggactaggaaatgctgcaactccatttggaataaaaactatggaggaaatgcagaaaataaataaaaaaaaaagtacagcaactaacgatatggcaaaatttcttgttataaacgcagcttgtatacagcttttacctactacaataatatctattagggcagcctgtgggtcttcaaacccagctattatagtaattccaacaatagtaacttcagttacagtagctataatgggattaatttattgtaagattcttcaaagacatttttaggaggtgagcttgtgaattatatttcaagtgcattaataccaattataatattttctatagttttatatggaatgataaagaaagtaaaggtttatgaatgttttgtagaaggagctaaggatggaattagaatatgtgttaatatatttccgtatattcttgcaatgcttctttctgttgctatctttagagaatctggtgcaatgcagtatttaataaatattttaaagcctgtatttaagattataggtttcccatcagagcttgttccgcttataatagtcaagccgctttcagggagtggtgctcttggagtttttgcagaaatacttaaaaaatatggagctgatacatatataggaataatagcatcaataataatgggttctacagaaactatattttacacaataacagtttattatggagctataaaaataaaaaatataagacatactttatgggcagcaattatggcagatatgacgtcaattattgtggcaatactagttgttaggtttatggggatttaagtgaatgaaaatgaagctggatatgattttggttatgtagattaataaagcagtcttgaatatcatattgaatttgtaagatagctgtggcattagcataaaaatatgttaacgtgacagctgtttttatttatattaatttaatattatctgcaccaatagctattaggtaacttaaaatgaattaatgttatggtttaccacatttctgtaaaatgaaattgtattaacaaaatataaaataaaagttataataaaaatataattttgaaaattcaaatctataacgtttaagcgaggtatgtattttggaaaaggaaactttagaaaatccagtattagaggaactagttaaaaagattgaagagaagacagaagaatttgcattaggtgttgaaaaattgacagaagaatttgaaagcaaggtaaaatacgacaagcacaaggacgagataatagataatcttcatgaggaacttcagagttatagaaatgacataatagggaaaatgatcaagccacttattacagatataatttataccatcgataataacaataagacatgtgaagcacttaaggacaaagatggcactgagtttacaaaagaaaaagtacttcaaatagtaggcggtttatcagaagatttagaggacatgctgtatagacagggtgtagaggatttcacatttagttttcctgaatttgatcctaagaagcagaaggtagttaaaacagttgagactgatgataagaataaggatagaactgtttcaaagagcataaaaaaaggatacatttgggatggcaaggttatacgccatgaacttgtagaggtatatgtttataacagtaatgtaagtaaggagcaggaggaatagcaatgaatgaaatttttggaatagatttgggcactacctattcatgtatatcttatgttgatgaatatggaagaccagtggttgttcccaacgctgagaatgaaagaataactccatcagtagtgttttttgatggtgacaacgttatagttggagatgttgcaaaagaaaactctaaaatgtatccagaagatgtagtatcatttgtaaaaagatcaatgggagacgaaaatttctattttgagcatggaggaaagaactatcatgctgaggaaatttctagctttatacttaggaaacttataagtgatgcggaaaataatttaggacaaaaaataaatgatgtagtaataacatgtccagcatatttcggaataaatgagagagaggctacaaagcttgcaggagagatagcagggttaaatgtaaaggcgataataaatgaacctacagcagcggctgttgcttatggtgttgattatgataaagataaggtagttttggtatatgaccttggaggcggaactttcgacgtaacaatgattgatgtgaaaaaggattctataaaggttatatgcactggaggagatcacaatctaggaggaaaggattgggatgatgctcttatagcatacatggcagagcagtacaaggagataacaggaaatgataaggatatactagaagatcctgaaacctgtcaagagcttcaacttttagcagaaagagtgaagaagactttatcacaaagagaaaaggcacctatatcaattaattacgagggagaaagggcaaaaatagaaataactaggcaaaaatttaatgagttaacttatgatttacttcagagaacagtaaatcttatggatgatatgcttaaagaagctgcaaagaaaaattatacaagctttgatgagatacttcttgtaggaggctcatctcgcatgcctcaagttgaagagataataaagaataaatataatatagagcctaaggtatttgatccagatgaagctgtttcaaaaggtgcagcactatatggctggaagctgtctgtaaatgatgagctggtaagaagaatatcggaggagacaggaaaagatattgaggatataaaaaagagtatagatgaaaagagtatagatgaaaatgtggttgaggcagcagcaaagagggtagcagatgatacaggttatactctatcagcagttaaagcttcaaatgttaaggtagtcaatgttgtgagtaaaagttttggagttgtaacgtataataatgaagaaaaagaagttgtttataatctaataattaaaaactctgaggttccatatgaatttacagaaagatttgggactagagaagaaaatcaagaaaatgtaatgataaaaatagttgaggatgagctttcagataaaattgtagatatagcttatggaaatgaaataggagaggctgaattagtacttccagaaaatcttcctaaaaattctccagttgatataacttttaagcttaatgaagaaggaaggcttgaaattaaagctattgaagctgtggaaaaaagagaaataagtacatccatagaaacaagttcagtaattaaaggaaaagaccttgaagaagctaaagagagaaataaaaatattgaagtatcgtaaggattgatgtatagatgaaatatagtttaggtatagatttaggaactacattttctgtagtttctattattgatgaaaatggagctcctaaggttttaaagaacaaagaaggaaatacgttaacaccatcagttatatattttagtggagaagaaattattgtaggcgatgatgcaaaagaaatgcaggcaatgggagataataacatagcctgcttttttaaaagaaatatgggagatgaaaactttgttcttgaatttcaaaacaagtactacaatgcagaggatttatcagtaatagtgcttaagaaattaaagaaggatgcagaagattttcttaaggcagaggttaaggatgcagttataaccgttccagcttactttaataatatacaaaggcaatcaacaataaacgcaggtaaaagagctgaatttaatgtcttgagtatattaaatgagcctacagctgcggcaatggcgtatggaatgaaagcttcaggagaaaataaaaatatacttgtatacgatcttggtgggggaacctttgatgtcactttagttcatataggagaggaacttatcaaggtactaagcactgatggtgatcatgagcttgggggtaaggactgggatgatagaatagccatgtatattggagaaaagttctttgaaaagtttggcgtaaatccaatggatgatattgagtactataatgatattcttgtaaaatgtgaaaatgtgaagaagcatctctctaaaagagaaagcactgatattagtatttattattgcgatttaagtgaaaagttcaccataacgaaggaaatatttttaggccttacaggtgatttgcttcagagaacaaaaagcttaagtgacgatgttataaaaagtgcagggctcacttgggaggatatagacggagtgcttccggtaggtggatctacaagaatgcctatggtacttgattttataaaagaagtgagtaaaaaagagcctattgttggaataaatgttgatgaagcggtttcaataggtgcggcaataaaggcatctatggagaatgcaactaatacccctaccttgagaagagaagaaaaagcactttttacacttggtggctataaaaaaacagaggatgtaatgagtcacagtcttggtatgatagcattaaatagtacaggtgaaagatatataaacagtataataatagagaaaaataaaaaaataccatgtacagaaaaaagaccttatgagattagaaccggtaggaatagaaacaatgttcttgaagtatatatgctccaaggtgaaagtgaagaaatatcagattgcactattcttggaaaatatgttttttatgatatagaatatgtaggaagaaaaccttcaattatagatatagagtattcttataataaaaatggagttgtggatgtttttgcaacacaaagggagacagctaaaaaacttcctttaaagatagaaaaattgtcggaggattttatatttgaagaggaacttaacgaaaaagaggaggctgttcataaaaatatagttatagcaatagatttatcggggagtatgagagggaaacctcttgaagaggcaatagaggcttcaaaaacctttgtggattcaattgatgaaggtagtttttccctagcgttaataggctttgcagataaagtgaaaactttgattaatctaacagaagatagagaagaaatatttagagccatagatggtttgaaaaaggcagatgtgggaacttcaactatgtccgagccttttagtgaagcttataatatcctaaaggatgcatatggagattgttttgttgtagtattaactgatggtcaatggtatggaaagaaagatattatggcagaggttaataaatgcaaagaatatgaaatagaaattgcagctattggatttggaaatgcaaaaaaagattttctagataaaatagcaacctgtgaggaaaactctatttttacggaagtatccaatttaaaacagtcattttcaagaattgcaaaggttatatcgagatcagatgggagcataaagatatttcaaaaaagtaattccataaaacttagataaaaatcatatttagcagcggagataaaattggttaccgctgctaaaatgctaataaacgtacataaaatcttcctattagtatgaggtgaatgaaatgcaaaaaagagagaatttttatactcttttggaactaccaatagagcctaaggagcaggatgaagaagtaataaaaaatgccataaacaaaaaaagaagcgagtggtcaaagcttagaaaccatcctacaaaggcggttaaggcaaagttatatttaggaatgataaaagagatagaaaatgtaatgcttaaaagtgagtactcaagaaatgaagaatggaagcgtgcaataaaagaaaaaagacaaaaggaaaaaattaaatataatattttagatgaggctataaagcttctatgctcaaagggatatatttttgatattgaaaaagagacgcttaagaaaaagtttatggagtttaatgaagctgaaataaatagtaggattaaagttccagtaaaaatatacgaaaaaagtaaaaaagggaaaaataatgacgaaaatgttttagataccactagaataaataaaattcaatcaaatcttgaaattgtagacaagaaatccttgtatgattttcttggagttcccatgtcatctggtttagctattttgagacttgcatctaaaagaaagtatgaggaaataaaaaaatcttcatctaaaaatgcttttataacagcaagctcaatacttcagggaatgtgcgatgatgtttttaaagatgaagaaaataagagaaaatatgatgaagcattaaaaaaagttaatacagaaagtttagcggaagtaatagaggtatccttatcaaaaggatatatagcttatgaagaatttgactgtatggtaaggttgcttgtagaaaatggaatgggtacagaagaagcaaaggaatatgtcaaagatttttgtattaaaagaaaggtttcaattgaaatacctaagcaactatctgtagaaacaatggaaaggtgcagtatatgtggatgtctaaaccacaaaatttctaggttttgttataaatgtggattccctttaaagattacgtgtcctaagtgccatagagtaattagtgcagcacatagtgtatgtactaattgtggatttcatgtagaggatatgagtgtggcagctgctttagtaagagatgctgaaaacaagcttcagtgtgataatacagaagaagcgtactttttattgaaaaaagcaaaggagttatggcaggacaatagtaacatagatgagatgcttaaaaaaatacagaataaaataaatataattgttgataggcaaaataaaattcttgaatttgttgaaaaaaaagcttattatagtggaatgaaggaaattatatcattaaaaaaattgaacacctcagcatttatagatacctatgaaaaaataataagtattaagatagctgaggctgaaaagcttatgcaacaagctaatgatataactaatgagagtgtaagtatagaattatgcactaaggctctaaacatttgcagtgattgcacagatgctttgacatggctttcaaaatatccacctaaacctccctacaatttaagatatgaagtactaaatgatagtgtggttttaaaatgggatagcagagaggcggataatgtaaaatatagagttctaagaaaattaagaagtgaacctaattctattgatgatggaaaattgataggacaaactgaggaaaatgaaattacagactttagtgtagaagctggacagacttactattatgcagtattttcttacagggcaagcattcattcaaaagcattttcatatataggacctattatgcctgtgtctgaagttgataatattgaagtagaaaacagcggcacagaaataatactctcttggagtacacctgttaaggccaaagctgtagaggtttggagaaaagagggagttgcaccgttaaggagaggtgatggaacaaagcttgaaaatgtatctttgtttggtgttgaagacacggaacttacaagtggtaaaaactatggatatttgatagttacaaaatatagagattccagtggcaaggagatattaacaaagggaataacttgttttggaaaaactattaatcctccggaattgattagtgatataaagctgtcaattactaaggaaaaggatataaaggttgtttggaagcgaaaagggtataagggaaaagtttatatattttactcgacaaatccttttaaatttgaagagggacagattatatccaagaataagcttagcagttttgagaacagagcacttataaagaaaagtggagaatgtgaaataaagaatgtagatgcaggaactatttttgtacttcctgttgtatcagaaggtaactcagcttgtgtaggaaaacaacagcatatatcgattctaaatgaagttgaaaaaattacaggatatatatttgacaaaaagctttatcttcaatggagatggccagagggaatagggaaggttttagttggactaaaatttgatggatattgttctggtataaatgatagtaaagcagtttatagagagatttctagagatgagtacaataagaaggctgcattcataatagaaaatccagaatacaaagagtatttttttactgtatttgcaatttatgaaacgttatatacaaagaaatattcttatggtacaaggtgtaaactaggtaatttaggtgttgcagaacttcactatgaaataaagaggtcgaagggtatatttggactaaatagaggaattaatttttcaataaaaaatcctgatgaatcaggaataccaacttatgttttagtggtaaatgaaaagaaagaacctgtaggcaaggaagatggaagaatagtttatgagggcagcgaggatagggtttttattgatattgaaaatgttgacgcttttttaaggcctttttttactgtcagtagtgatagatataaatttataagaatttagtaatatattttaagaaggaagtgcctactaatgaagatagtttttcttaaagatcttaaagccgatgaagtaatagcaaaggatatatacaatgaagagggtaagcttctgattactgccggtacaaaggttggtagaggaagtataagttttttaaaaagaaataatgtttttttagttcatattgaagatgaaaaattaagtgatataaaagtagataagaaattagaaaaactgaaaacaaaaacacttacgaaaatgccgctcatatttaataacatacttacaggtgaatataaaaatactatggaagctatggaaactgttgatgagcttgtagactatatagttgataagggaactgtaaatactaatctttatgaggttaagctttatgacgactatacttacatacactgcctagatacaggtataatggcagcttttttaggattatccatgggattaaatacagcaagaataaaagatttaagtattgcagctatgcttcacgatattgggaaaactaaaattcctagtgaaatcataaataaaaaagaaaagcttactgatcaagagtatgcaattataaaaaatcatcctgcctatggaagagatatattaaactccattggaatgttgagtgaagaagttatagatggggtttttaatcatcatgaaagatatgatggaagtggttatcctagaggattaaaaggaaatgaaatatctcaatttggtagaataataagtatatgcgatgtgtttactgctgtaagtgcaaataggtcttatagattgaggtttaagcctaatgaagcatatgaactaatattgtcgggttcgggaagtatgtttgatcctgattttgtggatgagtttagaaatacattttttatttatcctcttggttcgtgtgtaagactttctaatggggttgagggatatgttgtaaagcaaaacaaaagttttccagatagaccagttatcagagttatatatgaaaaagataaagcaaattcaatttctccatatgaaatagatttattgcaacataatgatataattatagaagaggttatttaataattatagaaagagagtgattttatggaggaagtaatagaaagatttttaaagtacgtaaaatttgatactcaatctgatgaaaattcaaacactgttcctagtacggataaacaattaaagctgggaaaaaatcttgtagaagaattgaaagaaataggactttcaggagtatctattgatgataatggatatgttatggcatatttgccagctaatatagagaaaaatgtaccagctttgggattcatatcacatatggatactagtccggatatgagtggagaaaatgttaatcctcaatttgttaaaaattatgatggcaatgatattgttctaaataaggataagaatatagttctttctccaaaggattttccagaaatattgaaatataaaggcaaaactttaataacaacagatggaaacactcttttgggagcagacgataaagctggtattgcagaaataattacagctataagctatatttcaaagcatccagaaataaagcacggaaaaatttgcataggatttactccagatgaggaagtaggaagaggcgctgattactttgatgttaaaaagtttggagcagatgttgcctatactgtagatggcggagattttggtgagcttgaatatgaaaactttaatgctgctagcgctaaaataacagtacatggtagaaatgttcatccaggttctgctaaggataagatgataaattctatttctgttgcagaggagtttatgaggcttatgccaaaagaacaggctccggagtatactgaaggttatgaaggtttctatcacatagttgactttcaaggtagtgtagaggaaactaaacttcaatatataataagagatttctctaagaataaatttgaagataagaagaagctaatgcttgatgctgctaaatttataaatgagaaatatggaagaaatttagttgaaatagaagttaaagatcagtactataatatgaaagaaaaaattgacgaagtaaaatatgttgttgatatagcatataaggcaatggaagaagttgaggttaagccattagtaagacctataagaggaggaacggatggagcaagattatcttttatgggacttccaacacctaatttatttactggtggagtaaactttcatggtaaatttgaatatattcctacttttgctatggaaaaagcagtagaggtaatagttaagatagttgagctatatgctgaaaaataataaaagggtttctgggtttgttttaaacctagaagccctattacatttaactatagcttaataaatggactatttttaaatgataatattaaaaaataaaagctggctcagtttataaagttgcacgctagttttatataaaagacaaataatatatttcggagggataagcgtaatatgaaagctaaagcgaagcatctaatagtaatatctatagatgccctaaatgcaaaggattttgattttataaaggagcttcctaacttttcaaacataataaataatggttcatatgttagggaggttacaggagtgtacccatctgttacatacccatcacatacatcaataataactggaacctatccagagaagcatggaatatttaataatgaaaaaatgcagataggagtaaaaacccaagaatggtattggcaaaagaagtatattaaggtaccaactttagtagatattgcacttgaacatggtatgaaggttggaaatgttttttggccagttatgggtggagctaaaattcattataattgtcctgaggtttggagtgtaaaaccatacacaaaccaagttatagcatcacttgtaaacggaacaccattatttcttcttaaattaatattgaagtttggaactacattaaagggggcagagcagcctaatttggatgacttcttatgtaagtcagtatgttatatggtagaaaataaaaaacctaatttaacattattgcacttgaacgaaatagatcatgcaagacataaatttggttttgcttctgaggatgtttatgagggtttaaaaagagaggataggagattaggagaaataatagaggcttcaaaaagagctggaatatatgatgaaactgcctttattgttttaggtgatcacggattttctgatgtagactataagatttgtattaatactgcttttgtgaaaaaaggactcatacacttagatagaaagggaaagatagtaaactgtaaggtatatgcaaattattgcgacggatctaaccaaataaaagtgatggatcctcaaaatattgacgaggtatcaaagcttcttttcgatatgaaggatagtggaaggtacggtataaaagaaatatatactaaggaagaagcggctaagaagaatatcagaggagactttgatttcatgctcgaagctgaagatggatattattttgacaacggctggaatgaaaaagatgtgattgtgaaaataaaaaagtcaagaagtagggcacatgaagaagggtactttgcagcaactcacggatatgatcctcttaaagaaggttatagaacgttttttgcagcatttggctgtggtataaaaaagggagttacaatagaaaatgctaatcttgtagatgagggacctactatggcagctatacttggacttgaaatgaaaaatgtagatggtattgtactaaatgatattttgatgtaatatactaaatatttttgctatattcatagtaagaattttgtattataattaaatcgtatattataaaaggaggctattttatgaaagcgattattacagttataggaaaagacaaggttggtatcattgctggggtaagttctattcttgctgaaatgaaaattaatattcttgacataagtcaaactataatgcaggaatactttactatgataatgcttacagatttgtcctgttcggttgtttcttttgataaggttaagactgaacttgatgaaaaaggtaaaaaacttggggtttcaatcaagatacaggatgaaggcatattcaactcaatgaacagggtgtaaaggagattaaaaatcgatgaatactaacgagatcatgagtacaataaaaatgattgaagaacaaaaacttgatatacgtacaataaccatgggtatatctttaagagactgttgcagttttaatggagaagaatccagaaagaggatttacgataaaataaccagatatgcacaggatttggtaagagttggagaagagatagaaagagattatggtattcctataatcaataaaagaatttcagtaactccaatttcaatgattgcagagtcatctgatgataaagactatgttgagtatgctaaaactttagatagagcagctaaagcagttggagttaatctcataggaggattttcagcacttgtccataaaggatgcactaagggggataagatcttattacagtctatcccagaagcgttacatactacagatattgtttgctcatctgtgaatgttggaagtagcaaaacaggaataaatatgaatgcagttaagcaaatgggacatataataaaggatgttgcaaatttaagtgcctcaactaacggaatggaatgcatgaagcttgttgtatttgccaatgctattgaggataatccttttatggcaggagcatttcatggggtaggagaagctgaatgcgtaataaacgttgggataagtggtcctggtgttgttaaggcttcacttgaaaaggtaaagggcgaaccatttgatgtggttgctgaaacaataaagaagacagcttttagaatcactagagctggccaacttgttgctagagaagcgtctaaaaaattagatgttccatttggaataatagatttatcacttgcaccaactccagcagttggagatagtgttgcaagaataatagaagaaataggagttgaagcgtgtggtgctccaggaacaacggcagcacttgcattattaaatgatgccgttaaaaagggcggaataatggctgcttcacatgttggaggacttagtggtgctttcatacctgtaagtgaagatgagggtatgatagctgcagttaagagcggtgcacttaatttagaaaagcttgaagctatgacttgtgtatgttcagtaggactcgatatgatagcagtgcctggagatacaccagctgaaacaatttctggaataattgctgatgaagctgcaataggagttataaataataaaactacagcagtgcgtataattccagcaataggaatgggtgtaggtgacagcgtagaattcggaggactttttggaacggcacctgtaatgcctgtaagcaaattttcttcggctgattttattaatagaggtggaagaataccttcaccaatacacagttttaaaaactaataaattttgcgttatgaaaatgagttgtattttcataacgcttttttaatatatatttatctattatggtttttaatatggtaaatatgcaattatagtgatattaacttacatatgcttaataatactaatgatatttttaaattaagatggtatatacgcctttataattaatatcaactagttttccatatcttccactgaatagaagagtggttaaaatgataaatattctttcaatttaggtttacattaagttatggaagtcataccaaagcatcaatcatgatttcaaaaatatcaaatacagtatggcggagaaaaacataagaaataaagtccatagtgactaaaaattgaattacaatgcaatatgtatattttagattttgatataaaaaaagtactaatgtataatatcaaagtacaagatatagtgtattggagggcatttgtatgctaaatgtagtaaaaagagatggtagacaggtagtattcgattctaataaaatatttaatgccataaaaggagcggccgatgagattggctatgacattaagcaaagtgatatacttgaattaactcaaaaagttataggaagagttgaggatttaaagataagagaaatttcagttgaggaagtgcaaaacttagttgaggaagtgcttcttgaaaacggaaataaggaaataggtatggcctattgtacatatagaaaagagagaacaaaggtaagagagataaaatctgatcttatgaaggttatagagaaaatcggaatagaaactgatagagataatgctaatgttggaaacaactatagttcaaagcttttaagaatagctagtgaatctaacaaatggcacaatctttctgctatgcctaaaaaaatatctagagctcatgaaaatggagatatatatctacatgatttagatagttataatttgagtataaactgtcttcatattccaacaaaggaagttctacaaagtggatttaatacaggttatggatatataagaccaccaaagagaatagagtcagctgcggagctttcatgtatacttctacaatcaacacaaaatgatatgtttggaggtcagtcacatcctgattttgataacgatatggctgaatttattgaggaaactagaagacaaataagacatgaatatgaagaaataggtgttgaagcggataagctagatgaatatgttgaaaaaaaattagtgagaatcgttgggcagtcaatgcagggtatagtttataatttaaacacaatgcatagtagggccggttcgcaggtccctttttcatctataaatattggaatacctcaatctaaggatgcagcacttgtgtgcgaaatatttttaaaagaatacgaaaaaggacttggaaatggtgaacaaccaattttccctaatataatttttagagttaaaagtggtgtgaatagaaacgaaaatgatccatactactatttatttaaactagcttgtagagttgcagctaaaagaatgaaccctacgtttatgaatatagatgctgattttaataaagagtattatgataagggatatattccagcaacaatgggatgtagaacttatttaatgtcaaatataaatggagaaccaggagtaaagggaagaggaaatatagcacctacaaccgttaacttaccaagaataggtatacttgcaaaaggtgatgtagataaattctttgaacttttacattcaagacttgaaatcgcaaaagaaagcttgcttcacagatatagtgtgcttaaaaagttaaaggttaaagatttaccgtttgttgtaggacaaaaccttatgaagggttctgaaaatttaaaaccggatgattccatagaaccagttcttaaacaaggtacatggggagttggttttataggactggctgaaacacttgtagcccttacaggacatcatcacggagaaacagaagaagcaaaagagcttggaattaaaatagtttcatatataagagattatcttgatgatttaaagaagcatataaagcttaattggagttgttacgctacaccagctgaaggcttatctggaaaatttattgctaaggataaagttatttttggagaaataccaggggttacagataaggattactatactaatagttatcatgtaccagttggttttgatatatctataaaggaaaaaataaatatagaggcaccttatcataaattatgtaatggtggacatatatcctatatagagcttgatgattatggcgatgaagagacaataatgaacataattaaatatgcatatgaaaatacaaacataaattatataggaataaacttccacataagatattgcaaggattgtggagagtatttggatgcatcagatatgaagtgcaagaagtgcggaagccacgatattcagggaatatcaagagttacaggatatttaagcctagatgagagatttggtgttggaaaggcagcagaaagagctgatagaatatcacaaggaactgcaaaacactgttataaataataaaaaagcttcttcattttactacaaggtattacagtgaaatgaagaagattatttttacataggtgggggattttatggaacttagagttgcgggttttttagataattcaatggtgaatggagagggacttagatctgtattatttttatcaggctgtaggagaagatgcccgggatgccagaatacggatatgcaggattttaaatacggcgaaagtgtttctgcggaggaaatatttaatagaattaagagcaatgttcctataataaaaggggtgactttttcaggtggagatcctttagaacaagctgaagggttaattaatatatcaaaggaaataaagaagctaggtcttaatatatggtgttatacaggatatacatatgaagagattttaaaagaaaaagattccaataagcttgaactactgaaatacatagatgttttggttgatggagaattcaaagctgagttaacagaaaatgcacctaagtacgcaggttcaagcaatcagagaattatcaggttaaaataactacttaatggagaaaattttaacctgatttttttcatttgttttcgtgtctaaggttagtacattgctttggagtctttctgcatttttcatactcattataaatttctcggcgccttcaagaggtaaaatagtgaaggtggttttataatgcataggaagtatgatattactattgatttttttacatagttgaccagcctctgcgccatctattgtaaaattaccacctacaggaatcatgagtacatctacatttccaagacttttcacttccaaatcagataaaacgtaacctatatccccaagatggcatacattaaaaccgtctatgttaaacaaaaaaatagtgttttcgcctctagcggcaccatgtacattgtcatgaaaggaaggtataccctttatggttatgtcatcgattttataatctccaggtttatcaattacttttggcgaattagtaacacagtcgataaagtcatgatcaaagtgatgatggcttacagttattatgtcagcctcacccttaaaggtagggtatcctatggaattgttgaacggatctagtaatatttttttatttctgctggtttcaataagaaaacacgattgaccataccaagtaaatttcaattttatcaccaactttcttatgtattatagtattaatgtataaaactttcaatatacatagaatatgttatttaaaaaaaatacattaatggtataattatagatatattttactcatgtacagctattttacataggctcaatttctttaagaaatactataaatgaggaggaaataaattgaaaagaataacaaaggctaatatattttttcttgccttaatagtgcttcagataattgggggcacaattatacaacagtttaatacaaagcttagacctaattttgctattgcgcttatagttactcaaattgtgcttttaattattcctaatttagtttatatcttagttactagacagtcatttaaaaaagttttaaggtttaatcccattaattttaaaagtgcatttattattatattggtagctttattttttatacctattgcaagcttcttagcaaactttacgggattattttttcgtaacaatgtagaaactgtaataaggaatatgaagggtacacctcttttagaaatgatctttgtactgggcatagtaccagcattctgcgaagaacttttagtaagaggttctattttgtcggcatataagggaatatcaatcaaaaaggcagctttaataaatggatttttgttcggagttttgcatcttaatccgcctcaatttttgtatacctttgcacttggtacaattctttcttatcttgtatattcatgtgattctatatttgcatctatgattgctcattttatatttaatagttttagtgctgtagtgtcttggtttgcaatgaggcaaaatgcaaaaccaacaggaaatgcaattagaaatcttcctgcaaatcagaagattgcaactttactatttggagcagtattagcggctgtagcgcttggtgttattattatactcataagagaacttatggatatgaataaagataagatagaaagtcaaaaacaggatgaagctgttagagaagagtacaatatatcagataaagttattgcaagtgttccggttttgttttctgtaatattgtttttagattatatatatgctaatctatataagatattataaaaatatgaagtaataattacaaaagttaaaatgtaatattttaataatagtggattagaaaggtaggataatatctatgggtagaatgtttggaactgatggagtaagaggaatagccaataaagaacttacagcagagcttgcatatagacttggaagagcaggagcgtatgttttaacaaatgaaactcataaacctaaaatattggttggtatggatactagaatttcaggcgatatgcttgaagctgcgcttgtttcaggtatactttctgttggagctgaagctgtatgtgttggtatagtgcctactcctgcggttgcttatttgactagaaaatacaaagcagatgctggtgtagtaatatctgcatcccataatccggtagaatacaatggaataaagttttttgatgcaaaaggttacaagctatcagataatcttgaggacgaaattcagaaaattatagaaagtgactttgagggagtaccgcttcctactggtgaaagtgttggaagaaaggttgtagaggaatctgcagaagaagattatattaagtttgccaaaagcactataggaacagatttaaagggaatgaaaatagctcttgactgtgcaaatggagctgcgtataaaactgcggtaaaaacctttagagaacttggtgcccaggtaactgttataaacaatgatccagatggaataaatataaactgtaactgtggttctacacatcctgaggaattgatggattatgttgttaagaaaaattgtgatttaggtcttgcttttgatggtgatgctgatagatgtcttgctgttgatgaaaagggaaacctgatagatggtgactttataatggctatctgtggtaagtacttaaaggataaaggtgaattacataaggatgtagttgttgttactgttatgagtaatatgggattatttttagcattagataaagcaaatattaaaacagtaaaaactaaggttggagacagatacgttcttgaagagatgttaaaagaaggatacaagcttggtggagaacaatctggtcatataatattcttagactataatacaacaggagacggacttgtaacggctcttaagatatgttcaatagtaaaagagagtagaaaaacactgtcaaagcttgcatctataatgcataagcttccacaggtacttgcaaatgcaaaggtgcctaataataaaaaggatatataccttgaagataaggagatatctgatgaaattaagaagattgaggaagaactgcatggtaaaggtagagtattaataaggccttctggtactgagcctttagttagagttatgcttgagggagaagatcaagatagacttaatactttagctcatggtttagcagagttaattgaaaagaaagcaaactagtgaatttttagagattatgtaaaattgtaaagtggttttacataatctctttttgtttatttgttgatactgtgaatattatgcttggaaatgttaataaaaaaataagaaatgtggatataatatataatgaaatttatatagggaagggaagtatattatgtctgcaaaattgttaaggataaaaaactacgtttctgtatttataaaaaggcttattgatgatggaataattgctttatcctctcaacttgcatatagtcttatatttgctttttttccattcttaatatttcttatgacacttgtgggattcagtagtattaaaagtagtgatgtacttgaggcgatgagaaaagttgtaccatatcaagtatatgggttagttaaaaatatcgtaaaggaagttgtagatactaaaaatggtaagcttctttctgtaagtttaataactagtatttggtcttgtgtttcaggatttaatgctgtaataagaggtttaaacaattcctataaagataatgaaagaagaagctttttaaaagtacagcttatatcaataatttttacatttggattaataataactatattttttgcaatgcttttaattgtatttggtgatataaatgaggaattaatcataaagaaatttggaattaacgagttttttggatatggagtttgggatttgataaaatatgggattttaacaataggaatgattttttcatttgcagcattatatagatacactccagctaataaacacaagtggaaaatggtatttccaggagctgtaataagtgcacttgggtgggtaatatcatctatatgctttacatactatgtaaacaattttggaaattattcgaaagtatatggaagtataggggcagttatagttctgatgacttggctttttataatatcttttataataatttgtggaggcgaaataaatgcagtttattttgaaataaaaaatcccaataaattaacaaaatcataagattatatgtatttacatagggagtgttttagtgtaaaatttagaattgcagaaggtaataataattttagaatagaggtaaagtggtgaaaggcttttggtttaaaatagttttaatttttgttgtatttttaggtgtttttatgttatttggatgtaataataaggataaaaatcaaaatagtaaaagaaaagttggtaaggaaaattccattaaaccagaagaaaagaaatttattaatgagtattatagtgatgaggttagtggtgattcaaaaggcttgagtaaattctatagcaatcctgaaagctcaaatactttggcaataaagaaaaaacttgagaattttggaataacaaaaataaatcttattggaatatacaatgttaattccaaaaatagattgaagataatggtgtcagcttttaatgcttattttaaaggaattagcaaaccgagaccagatatagaaatagtaacgcttattaataaagataattcttggtattttttaaatgacgaatctattcttaatgataatgaacagcagtggttagaagatgagaaagaaaagcaaagaaagtttatagtaagtaataagaaaatacaagatatattaaaactcaataagacatttgatgatgagaatctaggatacatgagggcttgtcaacagaagtttttaagtgatacaaaatagcgaataaaattataactcatacgtataaaaatatgtatgagtttttatatacggttttacaataattaagctttctttgaaacagctgattttacgcttacgccaggtattctaccaagtttaccagtaagggagcttaattcatccatggtaccgtctacaattatagatattaccgaaattcctttttctctataaggtatgcccatccttccgacaattactgagctgtgcatatgaagaattttatttacttcttgtgccatgcttatatcatctagaattataccgactacggcaattcgcttatccaatatacaaacatctccttatgtaaaaattcataacataattatatcattaaagtatcaggaattatgaaatagttatattaaaaaaatttgtgtattaaatgaaatattgcgacatgattttgcaatatttacttgaaataaatagtgataagtatacgcttaaaagtttaatccaattattgctgtaaaaaaaatgaagaaaaatagtaataatggattaatcattctaataatgtgtcggaatttaaagtatgaaaaatttttgagtgtttcatatagtgacataatatttctgaaaattatgataacatgtttatataaggttgattggaggttttgttatgcaagtagttgaaattttgaagaaaaaagttgaaatggtggatagggtttatgaatacgagtacagacttataaaaggggaattaacaatatgtcataaatatgacaatacaaaaatacaatcttacggtatagaagttgagagaaaagattttgtggacaataaaatagttaatattgagagggacgatattaaaaatataagcgtggaaaaagaaaaagtacataatcttatggagattctatataaaaatgtggtttcgccaatacattttatagaagttataggatcctatgtagataattatacagctgactttgattttgattttgtaggttaagctgtggacaagtcggattcataaattatatattagatgaaaaataagtgggtgaaaaatcagagttttataatttaaattataactctgctctttcactatttttatgcaatcaattctaaaatagtcagtaaaacatttaaatttaagcaatagctagtagtaatgcagaagtttgttctttatagtataataaatttcgcaatctattttaaaattaagaggtgtagttatgattaaaggagttggcgttgatattattgaaataaatagagtaaagaacgctattgatagaaattataaatttattgaaaaattgtttagcagaagagaaatagcatatataaaagctgaaaagacaaaggcacaatacatagcaggaagattttctgctaaagaagctgtttcaaaagcacttggaactggttttagaggctttagttttaaaaatatagaaattcataaggatgatttaggaaaaccaatagtagttttaaatggaggtgcaagagctattgctgaaggttatggaaaataccaagttcaattaagtatttctcatgatagagaaaaggctatagcttatgctgttttggaggtgttttaaggtgaaagttggtacctcaaaaattatgaataagatagatcaattttgtactacaagtttaggaataccaggaaatattcttatggaaaacgcggctctaaaagtagtaaaaaacataggagaagaatttaaggatatagttttagtatgtggtgttggaaataatggcggagatggaatggcatgtgcaagacacctaaatgcaataggaagaaatctaaagatattttgtgtaggaaatatagaaaagatgagtagcgactgtaaatttaattacgatatactgagcaatattgggatacaagtgataaatttagcgaatgaagatgatttagaagaatttaaaacggctgttcaatcagctgacctgattttagactgcatatttggtacaggacttagtagagaagttaaaggcatatatagagatgtaatctccataataaatgatgaaggaaattatattatggcagttgatacaccttcaggtttaagcagtgatactggaattgaaatggggatagccataaaagcacataagacaatatcatttgttatgtacaaaagaggtttttttagatacagaagcgaagattacacaggagagatagtaatagaaaacataggagtacctaaatttgtaatagataaatttcatgagaatgagtacatagtagacgaagaaatggcatcgaatagtattataaaaagagataagtatgcacataaaggtaactttggaagagtggcaatttttgctggagcaaaggggtattctggagcagcatatatatccacagaagctgctgttagatcaggttctggtttaattaccttatgcacaaaagaggaattacaaaatttactaagtagcaaacttgtagaggctatgactgctagttttaacgataaagaaaaaattgaaaaaattattacttcaagtgatgcaatagctgtagggccaggaatgggaaatactgaagaaactttttataaagtgaaggaaattttatctacagcatgttgccctattgtgattgatgcagatggaataaacgttcttaaggggaggctcgatacattaaaaaatagtaaaaataaagtaatactcacgcctcacccaggtgagatgtcaagaatatcaggtgtatctattgaaaagcttgaaaagaacagaatagatattgctaaaaattttgcagctaaatatgatgtaataatagttttaaaagggtataagacagtaataacagatggtaaagaggtttttgtaaatacaactggcagcagttatatggcatcaggtggaatgggcgactgcttaacaggaattatagtgtcgttagttggacaaggatattcgcctattatggcagcggctattggaacttttattcatggatattgtggtgatgtgttagcaaataagatggctaatataacagcctctgacatattgaaggaaattccatattcaataaaaaaaattagttataataaaatgagatagttgtgaatattaattaagtaatagaaattttaaggggaattgcatggagaaaggtaaaaaagtattcatacctatagttacagctgttttcttaatattagttttagcaatttttatgatttactattttataaatagagaacatgaaaaagatattgttgaatacttaaaggacttaaaaagctatagttgtagtataaatattgaagtaaaaaatgggaagcagcatattgaatataatggaaaacaaatgtatagactcggttcgggatatagactggagttgaacgataaaaaaagagttatgatatataaggaaaacaaagtttacgttcaagatgtagaaaataataaatcatatacactgccactcaaagttgatgatgtatataatatgacatttataggtaaatacattggcatgttgtacactgctgaaaatataaaatattctatcaaaagtatagagggaattcagtatgccctaattaaaataacaataccatgtcagaacaaaaatatgagttacggtgtactttatgtggatttaaaagataagtgtccaactgaacttaaaatatatgatgtaaaaaatgaggaaagattaagagtacaatataaagagtttcagcccgatcctagtttagaagataacttatttgagccagttaatatgtaattatgtttgcaggtggttcttgatataagaatagtttttatgtatcatttgtagaagcagagttttttaattttgtagtttgaatattatagtatttgttttagttataataataaggatggtgggcgaatgttcagacatataagacctgtatgggctgagatagatttagataatattgcatataatatgcagcaaattagaaggtgttcaaaaagtgatgaaataataggggtagttaaggctgatgcatatggtcatggagctgttgatgtagcaccagtacttttggagaatggtgcaaatcgtcttgcggttgctgtgataagcgaagctgtagaactgagaaagtcaggaattcaatgtccgataatgattttaggttatacacccttaagtttggtggatagtattataaaatacagtatagaacaaactgttttttcatatgattatgcagaaaagctatctgaggcagcaaggcaaaagaatataacgcttagaatccatatagcattagatacagggatggggagaataggatttttgccaacagaggaaagtgtatgggaagtttataaaataagtaaactttcaaacataataatagaaggaatattttcacacttttcaacatctgatgagacaaataaagaatatacgtatgcacaattaaagaagtttgaatggttttataatgaattaagaaagaaaaatattaaaataaatataagacatataggcaacagtgctgccataatggaattgccagaaactcattttgaggctacaagacctggcattatactatatggatactatccatcaaatgaggttgacaagaataagttaaacttaaaacccattatgacacttaaaaccaatgtggttcatataaaaaaaatgatgcctggtgaatatgttagctatggcagaaagtttaaatgtgaaagagagagtattatagctacacttcctgttggatatgcagatggatataccaggatgctttcaggcaaggcaaaagtaataattaatggtaactatgcgcctgttatcgggaggatttgtatggatcaatgtatgatagatattactgatcttccaagcgttcaagttggagacgaagttgtaattatgggtgaaagtgatgataaaaaatttacagcagacgatatggctgaaatcataggaacaataaattacgaagttatttgtatgataagcaagcgtgtaccacgcgtttatataaagaatggggaagttgtaaaaataaggaattacgtgtagcgaattttatagaaaaaccttaagttttagcaaatcctttgacatattgacacttgatgaattataatcagtatatacatatattcgttatagttgataggaggtattaatttttgtatgtcaagttcaaagagattagtagttaacctctcagaaacactttatgacgagtttaacaaagcacttaaggaagattgtaaaaaaagaagtgaatttattagggaagctataatattatatatagaggagagaaaaaaacttcaacagatagaactcgtaaaaaaaggatatagtgaaatggctaaattaaatatagaaatttgtgaatgtggtttttcctctgatttagaagatttgaatcaatatgaagttatgctatcggagagtgatttgcttgatgacaatagtggtaaaacgaggagatatattctatgctgatttgagtccagtagtaggctctgaacaaggaggaatacgacctgtcataattattcaaaatgacatgggtaataagtacagtcctacggtgattgttgcggcaataacatcgcagataaataaagcaaagcttccaacgcatgtggaaatttcttcagaagattatggtttaaacaaagattctgttgttttgcttgaacagataagaactttagataaaagaaggcttaaagaaaaaataggtcatatgacagatatggatatgaaaaaagtggatgaggcgcttttaattagtataggtcttcaaaatatgtttgagagtgtataggacgaaagttatactaaatttaaattaataagcactattcttatcgaatggtgcttatttttgtgaggttaggaggagtttttgtgaaaaatgttgactataaattatatcttgttacagatagaaaagttttgaaggaaagagatttatacaaatcaatagaagaggctataaaaggtggggttaccctagttcaattaagggagaaagagatgtctaccttggacttttatgagtctgcacttaagcttaaaaaaataacagagacatataaaatacctcttataataaatgatagaattgatatagcactggcaataaatgctgatggtgtacatattggacaaagcgacatgccgctgattaaggcacgtgaattattagggaaagataaaataataggtgtttcagctcatagcattgaggaagctttagaagcggaaagaaatggagcaacgtatcttggagtaggtgctatttataatacttcaaccaagggtgatgctcaagctgtaagcctcgaagaacttaagaatataaaaaatagcgttaaaataccagtggtaggaatagggggaataaatgaggagaatgctaacaaggtaattgaaactggtgttgatggaataagtgtcatatctggaatactttcagcacaaaaaattaaagataaggctagagttatgtttgatatagttaaaaaaaattcaactaaataagtcgtatacaccaaaactttgttgaggtcttagatattttgcatatatagcctgattttgccttgagttcaatgtagagtgtgaacaaaaagtaaattttaaactaaaatcagaaaaaatgcacaaactaactactgggtgaggaggatagatatgaaaaagtttaaagagtatttatatataacattaggttttctaatagtagccgcttcagttaagttcttttttgaaccaaataatatagctggaggtggggtaacgggatttgcaataattataaatgaattttttaaaaccctttcagtaggtttaattacatttgtgttaaatgcagtgttatttgcagtagcaatgatatttatagatggaaactttggaattaaaaccttgtattccagttttggactttcagtttcattatggattatggataaatacatagtatgtccaccgttaactaaaaatttactactggcgactttgtttggaactctaatatcaggtataggaatgggaatttgttttaatcaaaatgcgtccacaggtggaacggatatacttgctaaaatgatgaataagttttttcatatggatatagggaaagcacttcttttggtggattttgttataacactttttgcaggatttacacttggggcagatcttggaatgtattctttactttcagttataataggaggctttgttatagataatgttatagaaggattgaatatatgcaagaagataatggttataagtgataaaaatgacgcaataagtgaatttataataaaagaactagaaagaggatgtacaattatagatggaaaaggtggttatactggcaaggatacttacatattatatactgtactcaatagaaaagaatttataaggcttagaatatttataaaagaaactgatccaaatgcttttataacaataagtgatgcaaaggaagttcttggagaaggttttaaagaaatttagaaaacttaatactatgttaataaatggcgttttgtatatttagcatagtatgttataataagagtagttttgttgatttgtgataacagttttgtagaaaaaaaagataagtgggagagatatatgatagaatttaaaaatgttaataaaacatacggaaatgatgtaaaagctctttctgatataaatatctcaatcgataggggagagtttgtatttgtagttggtccaagcggagcaggtaaatcaacttttataaaattgcttatgaaagaaattgaacctacttcaggaactataatagtaaatgatgtagaaatatgtaatttgaaaaagaagcaaataccgtactatagaagaaagataggtatggtgtttcaagattttaggcttatacctactctaaatgtttatgaaaatgtagcatttgcaatgagaattgttcaagcaggtcataaagaaataaggaaaagagttcctatggttctagcgcttgttgggctttcaagtaaggcaaatgactttccaagtcaactttccggaggagagcagcaaagagtttcacttgcaagagcgatagtaaataatcctgcagtcttgattgcagacgagcctacaggaaatcttgacccagatacagcaaacgagattgttaatataatgaatgatataaacaaagcaggaacaacagtaataatggcaacccatgctaaagaaatagtaaatgacatgaaaaaaagagttatagcaatagaagatggtatggttgctagagatgaacgaaggggaagatacgattatgagagttagtacattaaagttattttttatagatgctcttaaaagtttaaaaagaaataagactataagtactgcagcagcagcaacagtagcggcaactctttttatactaggagtatgtttattggtgcttcttaacgtaaaaacaggaataagcgatgtaagatccaaagttcaggtacaggtttactttaaagatgatataacaatagatgaacaaaaaattgttttaaataagttggcggacgtaccaggcataacaggaataaaattcgaaagtaaaagtgatgctttagctaaatttaaacaacaactaggaaatgataataaaacattagttgaaggtatggatactagaaatcctatgcctaattcatatgttgtaagtgtttcggattctgattatgcatcaggtgtggttaaagctcttaaagataagaatggatctactttagatggaatagagaagatacaggatggaagagaattagtaaataagataaccactataacaaatacagttcaatgggttggaattgctatatttattatattggcgggtgtgtcattgttcttaattggaaatactataaaacttacagtatattcaagacgtagagaaatagggataatgaaatatataggtgcgacagattggtttataagacttccttttgtaatagagggaatgattataggtatagcaggagcgcttgtaacaattttggttgtatataacttgtatagagttctctttaataagataagaagtagtttcttaacaatgaatataatacagccttcatatgtattgacttttatgtcctgggaatttattttagcaggaatgtttattggagcattaggaagtattgtagttataagaaagtttcttgatgtgtagcctaaatttatgttgatcttttgatataaggattaaattaagaccactccaacctcctaatataatttagagttaatcttatttctaaattatattttggtatggagtggttttgttatatgtttttatttataaatagtgaatagatataaagattttgccaaacattatttaatagtgctataataaataatatttggtatatatgaaaacactatgattattataaattaacaatattattgaaatttctaagtgtatttcataaaaatttgtgggacggtgaaagctttggataataagaagaaaaagtggattgtcattacggtggctattgttgttgttactaatatagcttcattatttttgggcggaagatttttagtatttgcgggaaatagtagagttgcagtagataaggatacatatgacactgttcaaaaattctctaaattgttttctgtaagggatcaactttataaatactacgatggtaaaatcagtgatagtgtgcttttggatggagctttgaaaggaatgacttcatctttaaaagacccatatacagtatatatggataaaagtgaaacaaaatctttcaattctgaaattcaaggacaacaatatgtaggacttggaatggaggttcaagcgaaagacaataaagtaatagtatctactgtatttgataattctccagcggaaaaggcagggatgaaatctggagatgttattgtaaaagtaaatggaacggatgcagtaagcactgatcttgagaaaacagtttcgatgataaagggaaaagaaggaacaagtgttacacttacattatacagatccaccaagggaaactttgatatcacagcaaaaagacaaaaagttgctattgatactgtaagtggagaaatgttaagtaacgaaataggatatatgcaagttagtatgttcgatgaaaatactgggaataactttaataagaaaattgatgaattaaagcaacagggaatgaagggacttattctcgatttaaggtcaaatccaggaggacttctcagtgcatgtatacaagtgacttcaaactttgttacaaaagataaagttatagtttcaacaattgacaaatataattctaaggaagaatataaatcaaagggtggaaattatataggtcttcctcttgtagttttagtagatggaaatacagcaagtgcttcagaaattttttcaggtgctataagagattataaattgggcaccctaattggtgaaaagacatttggtaagggtgttgttcaggctccatttgatttaaatgatggtacacaacttaagataactatatctaagtactacacaccaaatggtgaaaatatacaccacaaaggtataaaacctgatatagaagttaagtatcctgatacacttaaagataaaccttatgatagaaattcggacccacaatttcagaaagctttggaacaaataaaatctaaaatgaaatagatttttatgattaatatatcgaaatttacttaaactattaacctatacatgagtcagagtattcatcaaggctcttgtataaggttattttagtgatttcaatgtagctgacattaaattatagctattataaaggagaggagaatcttttttacatgaatattgcggttcagacactacgagctctggctgagacgatagttactccttcttatcttttaacaatcattgttataatgataatgttttatatgaagaacagaagaatttcgtttatgcagagaatgataataggtcagaatatagagtcgcctttcgagcttacattgtcacaaataactctaagtataattgctggagcattaggtagtgttattctttcttatcttggagttgtttttaaagataacagcgcaatagtcttgttatttttaatttctgtaattcttatgtttgcaggaagtaggtttctatgtttctcttattcagggtccatacttggaattataagtatagtgattcaatttctttcagtgaacaaaatagcggatgtaagctctataaagtttcttgaaattgatgttgtaatgattatgtcactggtaggagtacttcatattgtagaaggaataatagtgatgattgacggaaaatctggagctattcctgtatttacaaatagagaggataaaataattggaggctttgctttcaaaaggtattgggttttaccaataacactattgtttcttttaaataatgcagatttaaatggaactgttaatgtagcgactccggactcgtggcctataattagaactgcgtttacagttatcggtaaaagtgctgttatatcatttatgatgttttatggcatcataggatataagagtgttacatttacaaaaagcaaacgtaaaaaaacatttatgtcaggaatggctatagcactttatggagctgttttattgggcttatctcaggtgcttaagcataaccttgaacagcagattatattatgcttgttggcacctttgttgcacgaaacaatgcttagattagaagcgtattctgaagtgaaggggaaacctaagtttgtgagcggcgaggatggagtaatggtgttagatgtagcaccgaattctcaagcctatgagatgggtataaagagcggagatttacttttagaaataaatgatacaaaaatattttcagaggaagatattacaaggtcgattcagaatatgagtaaatatatgtggtttaaaataaaagatgtacaaggtaaactgaatgagataagctacgataaatttgataggaataagaaacttggagcaatctttgtaccaaagggaatgccaaaggaaagtaagatagtaaaatttgaacataaatcttttgatgatattttggataatgttaataaagaggatgaaaataaaaaggatcaaaaataaaagatgttatagtaaataaaatggaccctatatagggtccattttaaagctataacatcttttatttttatactataagaaaatacactagaacagcacatcctagaatgattctgtaccacccaaaagctttgaaatcatgccttttaatatatatcatgaggaactttatagccaatattgaaacaataaaggcagatagcattcctatgaataatatggttatttcagttgaagtgaagtgaagaccaaatttgaatagttttaataagcttgccccaaacataactggaattgcaagaaaaaaggtgtattcagcagctacagtccttgatactccaattaaaagtgcacctacaattgtggcgccagaacgtgatgtcccgggaaatacagcagctataagttgaaatattccaattagcacagcggttgtgtaagttatctcggaaatagatgtaattctaggatgtttacctttattatgattttcaatcattatgaatagaataccaaatgaaattagagtaatagaaactgtttggtaattataaaaaagagcgtctattttatcatcaaaaggaatgcctacgatagtggcaggaatacatgaaataattatttttatccacatggatacaacgtctttttttaaataaaaacctccatttagagaaaatggtatgagtttattaaaataaagtagcacaacagataaaattgcgcctaattgtatgacaactaaaaatacctgtttaaaagcttctgttacatttaatcgtataaactcattaactagtatcatatgtcctgtgctgcttattggcagccattctgtaattccttcgacaattccaaggaaaattgcttttaatatttcgatatgttccataatatcctcccgtatttatgtttttaatatgcaaacagttttacaattgacataaagattgccatggcagaaagtactatgccaatttctatgtgctattagtgcaagttatgcttacttgtggtatatttatatttttaattgacaatagatataactaatattaaaattatatattataatacgaacaaatgtttgatggagatggtgtaatgggcacatttaaaataaattcagcgtttaagcctactggtgaccaaccacaggctatagcaagcatagttaatggaataaaaaataataataagtggcaaacacttttaggagttactggatcaggaaagacttttactatggcaaatataatagaaaaggttcaaaagccaacactagtaattgcacataataaaactttagcagctcagttatgttcagaatttagagatttttttccggatagttctgttgaatatttcgtatcttactatgattattatcaaccagaagcatatgttgcacaaacagatacttatatagaaaaagatgcttctataaatgatgaaatagataaattaaggcattctgctacctcagctctttttgagagaagagatgtaattgttgtagcatcggtttcttgtatatatggattaggtaatccagaggaatacaaaaaactttctatatcacttaggacaggaatgaataaagatagagatgagattctagaaaagctggttgaaatgcaatatgaaagaaatgaaataaattttgttagaggtacctttaaagtcaaaggtgacaccatagatatatttccagcaggatcaacaagcagtgctataagggtagagctatttggtgatgaaatagataaaataaaagaatttgacgttcttacaggaaatacaataaaaacattaaagcatacagttatttttccagcatctcactttgcaacttcaagtgataaaattgaagaagcgataaagcaaattgagattgaactagaggaaagacttagagagcttaattcggaggataaacttcttgaagctcaaaggttaaagcaaaggactaactttgatattgaaatgatgagagaagttggatattgtactggaatagaaaactattctaggataatggatggaaggcaaaaaggagaaccacctaaaacccttattgattacttcccagatgattttcttatgtttatagatgaaagccatgtaactcttccgcaggtaaaagcaatgtatggaggagatagatctcgaaaaaattctttagttgattatggttttagattgccaagtgcttatgacaacagacctcttaaatttgatgaatttgaagaaaaaataaatcagattgtatttgtaagtgctaccccttcaaactatgaactggatcattcagaaaatatagcagagcaggttataagaccaacgggactccttgatccagaaatagaggtaaggcctactaagggtcaaattgatgatctttattcagaaataaagaacacaattcaaaatggttttagaattttggttactactcttacaaagaaaatggcagaggatttaacagattatcttaaggatttaggaataaaaactacctatatgcattctgacatagatacattggagagaatgaagataataaaagacgtaagaacaggagaatttgatgttttagttggaataaatcttttaagagagggacttgatattcctgaagttgcactagtggcaatacttgatgcagataaagaaggattcttaaggtcagaaagatctcttattcaaacaattggaagggcggctagaaattccgaaagcagagtaataatgtatggagataaaataaccgatgctatgggaaaggcaataagtgaaacaaaaagaagaagaaaaatacagatagaatacaatgaaaagaatggaataaagcctactacaattaaaaaagcagtaagagatgttataggtataagtgaagtagcagagggaaaaacagaatataagagtatggatgaggcagtaaaagctgataataagaatatagataaattaataaaagaatttgaaaaggaaatgaaagaggctgctaaagaacttcaatttgagaaagcagcgtactttagagataaagtaaatgagcttaagaaaaaattaaatgaaaacgaagaggtaataaaataatgaaagataagatagtaataaaaggcgcaaaggttcataacctaaagaatgtagatttaacggtgccaagaaatgagtttgtagtttttacaggactttcaggttctggtaagtcttctcttgcctttgatacattgtatgcagaaggacaaagaagatatatggaatccttatcttcctatgcaaggcagtttttaggtcaaatggataagcctaatgtagaatacatagaaggtttgtcaccagcaatttctatagatcaaaagactactgggagaaatccaagatctacagttggaactgtaacagagatatacgactatttaagacttttatatgctaaaataggagttccacattgtcctaattgtggaaaagaaatttctcagcagactgtagatcaaatagtggatagtgttatgaaacttgaagaaagaacaaaaattcaagtgcttgctcccgttgttagaggaagaaaaggagagcatacaaaattaattgcacatataaagaaaagtggatttgttagagttagaattgatggagaagtatatgaaatagatgaagatgaaataaagcttgataaaaataaaaagcatcacattgaagctctagtagacagaatagtaataaagcaaggtgttgaaggaagacttacagattcagtagaaacagcacttaagctagcagaaggacttgttgtaataaatgtaatgggaaaagaagatatgctttttagcgaaaattttgcatgtccggattgcggaataagtataggagaaatttcgcctagtatgttctcgtttaatgcaccatttggaaaatgcgatgtttgtgatggaataggaactttacttgaaattgatgaggatttagttatccctgataaatcaaaaagcataatggaaggtgcaatagcgccttggggagaaggaaggttaaaggaagagtcatggacttttggtgttcttaaggcgctttcaaagaagtataaacttgatataaataaaccaattgaggattatgatgagaaaactttgaatatacttttatatggcgcaccagatgtgcttaaggttaactatgttaaggattctcaggaaatggtatttaatcaccattatgaaggcataattaatcaaatgaagagaagatatatggagagtaattctgattacataaaatctgaaatagaaaattatatgagtaacaatccatgtccaaagtgcaaaggagcaagactaaaaaaagaagtgcttgcaattacagttggaaacaaaaacatatttgaattttgttctatgccaataagagaagaagtatcttttattgatactttagaactttcaaataagcataaaattataagtgctcagatagttaaggagattaaaagcagacttgaatttttaataaatgttggtttggattacttaaatcttgctagagaagctagaacactatctggtggtgagtctcaaaggataagacttgcaactcaaataggttcaagtttagttggagttctttatatattggatgaacctagtataggacttcatcaaagagataatgatagacttatagcaacaatgaaaaatcttaaagatatagggaacacacttattgtagttgaacatgatgaggatacaataaaggctgctgattttattgttgatataggtcctggagctggagaacatggaggagaaataattgcggcaggaagcttagaggatataaaaaactgtaaggagtctataactggtcaatatttaacgggagttaaaaagatagaagttcctaaggagagaagagaagcaggcaaaaactttatagaaattgttggagcaaaggaaaacaatcttaagaatgtaaatgttaaatttccagtaggattatttacttgtgttacaggtgtgtctggttcgggaaagagtacacttgtaaatgaaatactatataaagccttaaataaaaaaataaaccgttcaaagcttaatccaggaaaatataagagcattaacggtatagaaaacattgataagattatagatataaaccaaagtcctattggaagaacaccgagatctaatccagcaacttacacaggagtgtttgacataataagagagctttatgcatctactaaggaggcaaagttaagaggttacaaggctggtagatttagttttaacgtaaaaggtggaagatgtgaggcttgtaagggtgatggaatagtaagaattgaaatgcagttcttatctgatgtttatgtaccttgtgatgtttgtaaaggcaagagatataatagggaaacattagaaataaagtataaagataaaaatatagatgacttattaaatatgactgtagaggacgcattgaagtttttcgagaaccttcctagaataaagaataaacttcaaactttagcagatgtagggcttggatatgtgagacttggtcaaccttctactcagctctcaggtggagaagctcaaagaataaagttggcttatgaattatcaaagagaagtacaggaaaaacactatatatacttgatgagcctacaacaggacttcatacagacgatgttaagaagcttataagtatacttcaaagacttactgatatgggaaatacagttgtggttatagagcataatttagatgttataaaatgtgcagattatatagttgacttaggacctgaaggaggggaaaaaggaggtactatactttgcagtggaacacctgaacaggtagctcaaaatagttcctcatatacgggacaatatctaaaaaagatgttataattatagggtatattatattagaatgcacgcattatgcttgaaattataacgtaagaaggtgttaaatattggtttctgtatacaacattagttctttggcagtgattggtgcaagcctaagcaatatgagtacaatttttaagtttgttataatagcaattgtatatcttataatcttcactgcctttaagataatgtataaggatatgaaaaatggcgacaaaaggcctgccgcaagtagaaaaagaacatttggacttgaagttttggaacctggaatgaataaaaccataagaagaggatcagttgttcctgtaagtagagaaataacaattggaagaaaagacgataattccattatgcttaatgaaggttatgtttctggtcatcatgctagagtttatctcagaaataatcaatatattctcgaggatttaaatagtactaatggtacagtacttaatggacaaaaaataaagagcaaagcatacataaaaagcggtgatgagataaaaattggaagcagcctttttaaggtaataggataggtgataattaaatggatagtttaaaggatgagaaaaaactcttaaggtatacttattttttttgtttgatatgtttcgcgaatatatcactactgaaagatccatttgatgtgggagctttagtgatgtttgctgtaatatgctttttgatgggatattctcattttatacttagaaagtttttccctgatggagataaatacttgttagtatttgcatgtattctttcttccatagggattgttatactgtatagaataaatccatcatacgcagttagacagatagtgtggtttattggcggtattgctgtttttatattaattgtggtgcttttgccagagcttaaaaaatatgatagatataaatatgtatatatggtgatatgtctattatttatggctatggcaacctttaaaggaacagaaaaaaatggttctagaaactgggtttatataggttcccttggttttcagccatctgaatttggtaagatatttttagttgcatatcttgcagcggcgcttaaagaatatgaaaactttaaacagcttatcgaaccagccttcgtagtaatggtatcattaggattcatggtacttcaaaaggatttaggatcggcactattgttttttgcaatatctgtaactatgttgtacatagctacagctaaaaagaagtatgtattggtatgttttatcctgtttgcagtaggagcttttataagttataaaatgtttgggcatgttaggcttagagttatgatatgggaaaatccatggccttataaaagcaatcaaagttatcaaatagtacaatccttgtatgctatagcttggggaggattatttggtacaggattgggacttggatatccgcaatttgtaccagtatctgaatcggattttattttttctactatatgtgaagaaatgggagcccttatggggtatgctataatgattttgtatttcttgcttttctatagatgtatgagggcagcagttcgtgcagaagataatttctctagacttcttgcggttggctacagcgccatgataggtgcggaagtaataatcatagttggaggagttacaggaatgattccgcttacaggaattactctcccacttataagtgctggaggaagttcaatgataatgatatttgttgcacttggtattttgcaaaagatatcggagggtggaagataacgtgaataatatttctagtaatataaaaaaagtgcttttcatttttcttgttatattttttgttactatatcttatataacttattttgagcttatagtttcgcctaagatagttaataacactgataataagagattatgggcaaaaagaaatgaagttttaagaggaactatttatgatagaaacaaaaaggctttaacaaagagcgaaagagtaaacacgctaactcagaaaagagaatatactggaggagcaatgttttcccatgtacttggatatgttaatccacagtatggtttaactggacttgaagctaaatatgatcagtatttgatgggtgctgatgatcaaccaattaatcagtatctcatggagcttataaagaacaaaggaaaagtttcgcctgaagataaaagaggtgaagatgttgttacaactcttgactacaatattcagcagcaggcttataatctattaggagataacaagggttcggttgtagtacttaatcctaagactggtgaaatactggcaatggtttcaaagccatcctatgatcctaatgatgatgctcttaaagcaagctgggcagcactcaatagtaatccagataggcctcttttaaatagagcggtatcagggctttatccaccaggatctacatttaagacagtaacagcaattagtgcactagaaaatatatcgggaattcagaatgaaacctttaatgatccagggcaattagtatttaactcaacggaatccttaagagattttggtggtgagtcttttggagatataggctttaagcatgcctatgttgtatcaagtaatgtagtttttggtaagattggacttcaacttggaaataataacttaaggcagacagcggaatcattttatttcaataaaaatattccgtgtgatggaattgtaattgataaaagcaaatttccaactttgaaaagttatgagaaggggaatatggctcaaagtgctataggtcaagcgagtgttttagcaacacctatacagatggcactcgtagctagtactgttgcaaatgatggagttatgatgaaaccacatgttgtaaatgagattttatctccaaatggtgacaaaataaaatctatcgaaccggagagtataggaaatatagtgtctaaagagaatgcggctacaatgaaggattttatgagaaatgttgtagaagatggtacaggagtaaatgcagcggtagaaggaatacaagttgcaggaaaaacaggtacagcagatcataaggttaatggaaaagatgctacacctcactcatggttcattggttttgctccttacgataatcctcaagttgctatagcagtaattgtagaggatggaggacagggcggaaaagcagctgctggaattgcatctaaagtaatccaaactgctcttcaaaaataaaggtgaataatgactggtaaaactcatgctggaattggtgcggcggttggaatagcattagcgggtaaattacccggaggatttaatgcggtgggaatggggctgataattgcagcctcaatactccctgatatagatcatcctaagggtatgttgaaccaatacatattacctataaaaagtaaatttataaaaactctcttttatggttcttttggagctcttgtcgtatttggaaactattacaggtttcacatatttatgctttatattcttggcgctcttctttttttaattgcaatttcctcacacagaaatggtcttatgcatagtgcagctggtatgatagtatgcactgtattagtcggatatgttgccaatagatacaatatacatgttattatatactattttatggcaggttatgggctgcacctattatgtgacatgagtacatcaaggggaatacctcttttatacccgtttaaaaagaaaaattataagttttcatatacctttagagttggttcggctaagggtacatttatagaaaactttttgataatactaagcttgttatacataatatatagacttccagttgtctttaaaacctaaggggggtaactctatgtttgattttgaataccaattaaagaatcttcctgataaaccaggagtttacataatgaaaaattctctcggagaagtaatatatgttggaaaggcaaagatacttaaaaatagagtaaggcagtattttaggaattccaaaaatcattcagaaaaagttaaggcgatggtaaaaaatatttccgaatttgagtatatagttacagattctgaaattgaagctttaattttagaatgtaatttgataaagaaatataaaccaagatacaatatattgctaaaggatgataaacactatccttttattaaagtaactatgaatgaagattttcctagaattattgttactagaaatatggttaaagacggctctaagtattttggaccttatccggatgtttcagcagtacatgagactgtagaccttatgagaagaatctttcccataagaacatgcaagaaatatataaaagaaaatggagaaaatataagaccatgtcttaattatcatataaagaggtgtaatgctccttgtgctggactcataagtaaagaagagtacggagaaataataaaaaaggctgtaggacttatatctgggaaaaataatgatataataagagagttaaaagaagaaatggagaaagcctccatgaatcttgactttgaaaaagcagcagatcttagagataaaatgctagcagcacaaaaagttacagaaaagcagaagataataattggtaactttgaaaatgaggattatataagtttatatagcgatgagaaggatagttgtgtgcaagtgttctttttgagagaaggaaaaatcgtaggaagagagcattttattgttgagaacacagctggagaaaatgaaggtgacataataggagaattcataaaagaattttatagtggaactgcatatgtccctaagagtatatatgcttctgctggagaggatttgaatcttctagagaattggcttacaatgaaaagaggctcaaaggtagagataaagattccacaaaagggtgaaaagaaggacataattgaaatggtcaaaagaaattcaaaaataaccctggagaaattcaaaataaagcttttgagtgataaaagattaaatgaaaacatacttatagaaatgacggaggttattggacttgaagaggttccgcataggatagaagcctatgatatttccaacattcaaggagttgattctgtaggttctatgattgtatttgaagaggggaaacctaagaatagtgactacaggcgttttaaaataaagactgtaaaaggtgcaaatgattatgatagcatgagagaaattttgactagaagatttaagcatggattagaggaagttaactcaatagtaaataaaaatctttcacttagtgcaggtaagttttgcgtttttcctgatcttatacttatggatggaggaaaagggcaagttaatatagctcttgaggttcttaaagagtttaatattgatataccagtatgtggtatggtcaaggatgatagacataatactagaggtataatatacaacaataatgaaatagatataaaatctaatagaaaaataattaactttgttacaagagtacaagatgaagtacatagatttgcaataacctatcatagaagtcttagggataagagggttcttcattcagtactggatgatattccatacattggagaaaaaagaaggaaagctttattaaagcattttggaagtatagaaaatatcaagaaagcgacctacgaggaacttatgaaaacaccttctatcgacaaaaaagctgcagaaagtattgttagttattttagaggaagaaagggagagtgaaaaattgaaataccttattgatttacacacgcatactatagtaagtggtcatgcatataccactttacttgaaaatataaaacaagcatctcagattgggataaaaatacttggaacttctgaacatggtcctaaaatgccaggagcacctcacatatggtattttggtaatatgaataaagtaccaagaaagatttatgatgttactgttttaaggggatgtgaggcagatatattgaattctaatggtgatttagatattccagaaagaatacaaaatgaactagattatattattgcgagtttgcatgatgtttgtatagaaccaggtactattgaagataatacaaaagctcttttaaatgccatgaataatcctaatatagatattttaggacatacaggaaaccccatgtatccaatagatatagatgctgtagttagtaaggctaaggaaaaaaatgtacttatcgagataaataatggttcactaagtggctctagagagggtagctatgataattgtaagaaaatagcacaagcttgtaagaaaaaaggcgtaaaagtaattcttggaacagattctcatataagttttactataggaaactttgataaagtacagaaattgcttgatagcgttgatatgccaaaggaacttatcatgaatacggatgagaaaaaaatagttgaatatttaaaagctaaaggtaaacttaagaattttaatcttgaataagcctatattttaaattatactaactttatattaataatttgaggagatgtactatggattactttcaagattttatagcagcattaagcaattttataaaaaaggataatcttaagattgacgtcccaatgaaaaaccatacttcttttaaggttggtggtccggtagacgttttagtgatgccagaaaagtatgaagaaattaatagaataatagaactttgtgaaaaatatgatgttaattactatataattggaaatggttcaaatttgcttgttagagacggtggactaaggggagtagctataaaattattaaaattgaataaacttcaaattggcaataataaaattatagctggatgcggagtacctcttggatatttaagcagaaaagcaagagataaatcacttactggtcttgaatttgcatgtggcattccaggaagtgttggaggagctgttgctatgaatgcaggagcttataatggagaaatttctaatgtagtagaaagtgttctcgtaatagacaataaaggtaaaatgaaaaggctttatagggacgaacttcagtttggatatagatcaagtgctatattgaaacacaaatatatagcattagaggtaacatttactttacaaaaaggtgatagggaaaaaatagctaatagaattgatgaccttatgagaagaaggattgaaaaacagcctttagaatacccatcagctggaagcacctttaagagaccagttggacattttgctgctaagcttatagaagatagtgggcttaagggtaaaggaataggtggagctcaggtatctgataagcattctggattcattataaataaaaatgatgcaactgcaaaagatatattagatttaataaaatttgtacaaaacactgtaaaatcaaaatttaatgttgaattggatacagaagttagaattataggtgaggacaaataatagagtgaggaatcacattgattatttagaagtgactgtgattagaatggacatttacagtcacttttatgctataattaattaataaataagtattgaaattaaaacttaactacaaactatataaatagacaaataaaggaggcaaggttttatgagatttgttattgttacaggattatcaggtgcaggaaaaacacaggcaataaggagccttgaggatcttggatatttctgcattgataatttacctccagcattaataccaaaattcgcacaggtttgctatgaatcagaaagtaaaattaataagatagctcttgttatagatataagaggtggagaattcttcgacaatctttttgaaagcttaaagtaccttaaagaagcagggtataagtatgagatattatttctcgatgcagataatgaggtacttataaaaagatttaaagaatctagaagaaaacaccctttagcaccaaatggtagaatattaaatggaatacagatggaacgtaaaaagcttaagacactatataatatggctaataatgtaatagatacgtctaagcttgctacaagagagttgagagaaaagataaattcaatttaccaggaagaaggtcaaattgagagtaaacttatagtaactgtagtttcctttggttttaaatatggaataccagtagattctgatttggtattcgatgttagattccttcctaatccattttatataccggaattaaaacgtttttcaggtatagagaagcctgttaaagattatgttatgtcatttgatcaaacgaaggaatttgtaaataaaatagaacaattgttaaaatttttaatcccaaattatctaaaggaaggtaaaaggcagctcatagtttctataggatgtacaggtggaagacatcgctctgttaccattgcaaacgagatctatgaaaggcttaaaaatgatggcgaaactgttaatatagatcatagggatatagaagaggatattaataaaggtggtaaaaaactatgaaatttattgattggataaagcctggcattaagcttaaaaggtggattatgcttgggggaatgggagtgttatttatttcctttgctctagcagaattaatcactaagggaagttattataatgtatattacaaggctttctatatattcttaatagtagtcggagcatttatcctctatatttctctaacgcaaggaatgaagtccataatatcactaataaataaggggtacttaaatgtatctttagattcaaggaaactaggaaatcttatatatgaaaaaagacttttagttaagggacctaagatagttgctattggtggaggaactggattatcaactatgcttagaggtcttaagtattatacttcaaatataacagcagttgttactgttgcagatgatggaggaggttcaggggcattaagagaggatcttggaatactgccacctggagatataagaaactgtattttagctttatctgatacagaaccattaatggaggatttacttcaatatagatttaaagatggaagacttaagaatcaaagctttggaaatctatttttggctgcaatggatggtatatcaactaactttgaggaagcagttcataaaatgagttctgtacttgcagtaacgggtaaagttcttcctgtaacactggacaatgttgttttaaaagcaaagctaaaaaatggagtagttgtagagggtgaatctaatataccagagcaggcaattttatatgaaagtcctatagaaaagatattcatagaacctgaaaatgcaagagcacttcatgaaactgttcaggcaataaaggaagcagatgctgtaatacttggacctggaagcttgtttactagtgttataccaaatcttttagttaaagatatagggaatgcacttttaaaaacaaaagctcttaaactatatgtctcaaatataatgacacagccaggagaaacagataatttttctgtatcggatcacgtgaatgcaataacgaagcatgtgggtggcaaagttgtagactacacacttgttaataatggtactgtaagtgagaaattaaagaaaaagtattttgaaaaaacttctgagcttgtaaaaatcgataaaaatgaacttgataaaattggcgttggaatagtagaaggcaattttatcaaaataaaagatggttttgttagacatgattcagatgagattgcaaaaattttagtagaaacaataatggataagaaattattctatgatagaaagaaaataatagaatacttctatttgtcacaaagacttaaagaaaatagaaaattagaaaaagaaaacaggggtaattagaatgtcattttcatctaaagttaaaagcgaagtttgcagatatgatgattatagtaagggtgaagctattgcggttttgtcggctgtgatgaaggccagcggaacattggctctagagggaaatagaaagataagctttaaaatcatcaccgaaaatccggctatagcaaggctcatttttaaattattgaagaagtattttgatatacatactgaaataatgatgaaaaaaagcaattctcttaagaaaaataacgtatatgttgtttccataacagaggatatgggggtaagagaactacttaaaactgttggagttatgaaaaatgaggatggtatagtaacattaagctatgatattccagagtttgtagtaaaagatgatgaaagcagaaaaatgtacataaggggagcttttcttggaggcggtagcgtaagtaatcccgagaaaatgtatcatcttgaatttgtaactcataatgaagattatgcttctaatcttagggatttgattaatacctatggattgaattcaaaggttatacagagaaaaaacagctatgtagtttatataaaagagggagagcaggtagtagatttacttaatataataggagcgcactcgagccttttagaattggaaaatataagaataataaaagagatgagaaacaatattaataggcttgttaactgtgaaactgccaatttaagtaaaactgtaaatgcttctgtaaggcaaatagagagcataaagcttatagaaaaacaaataggactttctagattgcctgaaaaccttagagaagtggcaaaacttagattgaactatccagatgaatccttaaaggagctcggtaagatgctggaacctccagttggaaaatcaggcgtgaatcatagactaagaaaaatagaaaagatagcagaagagctcagaaaagaggggagatagtaaatgtctaagcacgaagagataataaattatattatgtctttaaaagctggtactaaaatatctgtaaggggaatagcaagtgatttaaatgtaagtgaaggaacagcatatagagctataaaggaatgtgataacttaggattggtaactacaataccaagagttggaacggtaagaataaaaaaggtcgagaaaaaaaacatcgaggctcttacatatagagaaattgtagatataatcgaaggaactgtaataggcggagaaaatggtatagataaggttttaaaaaagtttgtaattggtgctatgacaacagatgttataggaaaatacatagatccaggaagccttatgatagttggaaatagagaagatgttcaaaaacttgctatattaaataacatggcagttctaataacgggtggctttgattgtagtaaggagataaagaagcttgcaaatgaaaagtgtctcccagtaatatcttccaattacgacacttttacaatagctagtataataaataaggctatatctgagaatctggttaagaaggatataattcttgtagaggatataatggacgaaacacctagctatcttaaaaattctgataccatagataagcttagaaattactctgaagagttaaatataaatgtttatcctgtaatagatagaagcaagaagctagtcggaatagtatcggtaaaagatgttagcgatgccgatgacagcgaaaccatagaaaaatatataaataagcatccattaacggttaactataagactactgtggcatatgttgcacatgtaatgggatgggaaagtatatctatgtgtccagttatagataataataataggcttttgggaatcgttacaaggagtgaagtcataaaagcacttcaatatatattaagacagccgcagataggagaaaaattagaggatcttatacttaaaaattttgattactcctatgtagaaaacggaatgagttttttaggcaaaatagtgccagaaatgcttgaaccaataggtacagtatcttggaattctttaaatatgctcctgtctactgcaggtgttatgacacttaaacagcaaaacaatacaaacatttccatagatagtatttctacatactttttaaaacctgttcaaatggataatacaataagcataaatacaagagttttaggaatgggaagatattttgccaatgtagaagttgatatgttaaatgatgatatggaaagcatagctaaagccatactttccgcgaagttattaaaggtataatgggagggaaaacttatgttaacacacattgtattttttaaattacatgacaaaaaagacgtaggcaaagtaaaacaaattttagaatcaattgagggaaatgtagagtttgcaagaaaagttaaggttggtatagatgttgttcattcaaaaagagcctatgatatagcacttatagtgaagtttgactctttaaaggatatggaaacatatcaagtacatccatatcatgtggatgtagttattaaaaatacaaaagatttaatacagagttctgtttcagtagattttgaagattagagaagggatgattacattggaggctgaatttaaagattttgttcatcttcatgtccataccgaatacagtctccttgatggttctggtaaggtcaagaaattagttgaacgagctaaagagcttggcatgaagagtattgcaataacagatcacggtgcaatgtatggatgtgtagagttttataaggcagcaaaggaagttggtataaaacctataatcggatgtgaaatctatgtagcaggaaaatctatgcatataaaacatcctgatgctgaaaatgaaacatatcatctagttttactagtgaaaaatgagattggatataagaacttaatggaaatagtttcaacagcttcaatagagggcttttactataagcctagagttgatcatgaatatctaatgagtcatagtgaaggacttatagcttcaagcgcatgttttggaggagaggttcaatcttatatattaaaagataatcttgagaaggcaaagaaagctgcacttttttataaagaaacctttaaggatggcttttatttagagttgcaatatcatgcacttaaggatgatatgaaggttaatgataccttggtaaatatgtctaaagaacttgatataccgcttatagcgactaacgatgttcattacataaataaagaggactctattgcacatgatatacttctttgtatacagacaggtaagactatcgatgaagaaaatagaatgaggtatgctcctgagcaattttatcttaaaagtcaagaagaaatgtatgaacagttttcttatgttaaggaagctttattaaatacatctaaaatagccgatgaatgtaattttgaatataagtttcatgagtcaaagctccctaattttcctcttccagagggtgaggaccactacgaatacttaaaaaagttatgctatgaaggtttaaatgaaagatataacccaattacagataccattaaggaaagacttgagtatgaacttggaataataaaagaaatggggtatgtagactattttttgatagtttgggattttattaagtttgcaagagaaaatggtgtgccaacaggaccaggcagggggtcagcggcaggatcaattgtagcatatacacttggaataaccaaaattgacccaattaagtacagtctgatttttgaaagatttctaaacccagatagagtttccatgcctgatatagatagtgatttttgttatgaaaatcgtcaaaaggtaatagattatgttgtggagaagtatggaaaggattgtgtgtcccaaattgtaacctttggaactatggcagcaagattgtgtataagagacgttggaagagctatgaattattcctacggtgaggttgataaaatagctaagatgattccaaatgttcttaacataaatatagataaggcacttgaaatgaatccagaactcaaggctatttatgatgacgatgatagaataaaggatttaatagatatatcaagaaagcttgaaggacttccgagacatacgtctactcatgcagctggagttgttatatcctctcagcctcttgtaaattatgtaccgcttttaaaaaatgaagaatccatagtagctcaatttactatgggaattcttgaagagcttggacttcttaagatggactttttaggactaagaaccttaacggttataaatgacactataaaaatggtaaaacaaaatagaaatattgatatagatattgatgatatagactttgatgattatggtgtttacaagatgataggtgaagggaaaacagtaggagtatttcagctagaatctgctggtatgactagttttatgaaggagttaaaaccagatagtttagaggatataatagcaggaataagtctctacagaccaggtcctatgaatgaaataccaagatatataagaaataaaaataatccagaagaaataaaatacgttactccagaacttaaacatattttagatgtcacctatggctgtataatatatcaagagcaggtaatgcaaatagtaagagatttagcaggatattcaatgggaagaagtgaccttgtaagacgtgctatgtctaagaaaaagcatcatgttatggaagaagaaagacataattttatacatggagttgttgatgaaaatggcaatgttgaagtgccaggatgtataaaaaatggaatttctgaaaaaatagctaatgagatatttgattcaatgatggattttgcaagttatgcttttaataaatcacatgcggcagcctatgctgttgtggcatatgaaactgcatacttaattcattattatccagcagaatatcttgcagctatgcttaatagtgttatgggtaatagtgaaaaggtagctttttatataaggtgtgcagaagagcttaaaattcaagttttacctcctgatataaatggaagctattcaaggtttaccgtaaaggaagacactataagattcggtcttgctgctattaaaaatgtaggttttaatgtaatagagagtatagtaagggctagaaacgaaaagggaaattttatttctttcacggatttttgtaataaaattgatacctctgaggtaaacaaaagagcagttgagagtataataaaatcaggaggatttgatactcttggagtttataggtcaaagcttcttgcagtttttgaaaagataatggacggaatttcagggcagagaaagaaaaatataaaaggtcaaatgaatttatttactgactttgtacaagacgattacgaagaagttgaaattcaatatccagatataaaggaatttgataaaaaatacttacttgccatggaaaaagaaatgacagggctatatctatcaggtcatccacttgaagattatgaagaaactttaaaaaatatgactagtataaaaatatcagatatagtagcacctcagtctctagaagataatgatggtgtaaagcttgatgaaaatacagatgttcaagatggtactagagttattataggcggaattgtgacttctgtaactaaaaaggttacaagaagcaatacaatgatggcttttataaagttagaagacatgtatgcagctatagaagttgttatattccctaaaatcctagaaaaaaatgcctcttacataaatgaagatgagatggtgataataaagggtaggataaataaaagggaagacgaacagcctaaggtaatatgtgaagagatatcacctattataaaaaatacagagaagatatatgtgcttgttgaagatgatactgctgttaaaacttcattaaaagaaataagaaaaatgctgcttttatataatggagacactccaatatatatgtgcacgaagaaggatagaaagaaatttcttattgataaagctttatgggttcaaaaggaagttgaggtaattaaatttttaacggataaatttggcgaaaataatgtaaaagtgatataattaaaagtaggtgttttgtacataataatatcagaaggtaaacacataattactatggatacaaaatacttactatttctttatttatataatggaaatatgcatattttttataaaaccattgaatatttttactttttcgattaaaattatatacgaagaaatttggaagttgttgttttaaggtatctatgaataattgtttctataaacaatctgggacaaattaagtccctgcggtcatgggaggtataatatgaaaacaatagctgttttaacgagtggtggagatgcaccaggtatgaatgctgctataagagcggtagtaagaactgccattgaaaagggtattaatgttaagggcatacaaagagggtacagtggccttataaatggcgaaatatttgatatgaatagacacagcgtatcagatataatacaacgaggaggcactattttaagaacagcacgttgtccagaatttcttaaagaagaagttagacaaaaggcagcaaatgttttaagggtttttggtatagatggtctcgttgtaataggtggaaatggttcttttatgggagcacaaaagctttctaagcttggagtaaagacggttggacttccgggaacaatcgataatgatcttccatatacagattacaccataggttttgatactacacttaatactgtattagacgcaattaataaacttagagatacttctacttctcatgaaagagtaagtataatcgaggttatgggaagagattgcggtgatatagctctgttttctggaatagctggaggagcagaaagtgtaataatacctgaaattggttatgattttaatgagctttgtaaaaacatcttagaaggaaaattaagaggaaaaatgcataatcttataatacttgcagaaggtgttggaggagcagctgagcttgcaaaaaaagttgaagaagttactggtatagaaaccagatccacaatacttggtcatattcaaagaggaggaagtccatcagcctttgatagaatgcttgcatctagaatgggagtaaaggctgtagaagtcttaatggaaggaaaaacctctagagttataggtattaaagaaggaaaaataatggatcaagatattgatgaggctttagcagttccaagaagttttaataaagagttatatgatatagcaaatatgctttcaaaatagacagtaattagtcaaatgattaattcacatatataaaatgattttttttcaaatcacaatttatataaaagatgaggagagaatatacaatgcaaaaaactaaaatgatttttacagttggaccagcaagtgagacagaggagattgtaacagctttcataaaagctggaatgaatgcttcaagacataacttttcacacggtgatcatgcagagcacggtggaagaatagctttagtaaaaaaggttagagcaaagcttaataagcctgtagctatatgccttgatactaaaggaccagaaataagaactggagatttcaatccttcaaagcttgaacttcaaaaaggttcaaaatttactatcgtttgtggcgaagaaatagttggagatgctacaaaatgttcaatatcatataaagatttatacaaagatgtaaaaccaggaaacactatattaatagatgatggtttagttggacttacagtagaagctatagaaggaacaaatgtaatttgtactgtagcaaatacaggattagttggaagccataaaggagtaaatgttccaaacgtttcaatacaacttcctgcaatgacagaaaaagataagagcgatttaatattcggatgtaaagaagaaatagatatggtaagtgcatcattcataagaaaacctgaagatgtacttgcaataagaaaagtattaaatgagaatggcggagaaaacattcaaatattctctaaaattgaaaatcaagaaggcgtggacaacatagatgctattatagaagtttctgacggaataatggtagctagaggagatatgggagttgaaattcctatacaaagagttccattaatccaaaaaatgataatcaaaaaatgtaatgcagtaggaaaacctgttataacagcaactcaaatgcttgattcaatgatgagaaatccaagacctacaagagcagaagcttcagatatagcaaatgctatatttgatggaacagatgctataatgttaagtggagaaagcgctaatggatcatatccaatagaagctgtaactacaatggcaaaaatagcacaagaggcagaaaatgaaatcaattatgataaattcctagcagaaagaaaaggaaatgaaaagaaaaatacttctgatgtaataagtcttggaacttgcacagcagcagcagacttagaagcttcagcaataataactgcaactcaaacaggaagcacagcaagaacagtttcaaaatatagaccaaaagcacctgtaatagcagttactccatctgaaaaagtagcaagaaaacttgcaatgagctggggagtacaccctataatatctgataaatttggttcaactgatgaacttatctctacttcagtagataaagcccttgaagcaggatatgtacaaaaaggagatcttgtagttgtagctgcaggtgtaccaacaaatgtatcaggtactacaaacatgcttaaagttcaagttgttgagtaatattaataatttaagataatataataatttatattataaattaactaaaacccaataaaaagaagggattgtttgacataggggcttgcaatctctttttttatacatcaaaatataaaaatgtgtgtaaaaagcttttattatggttataatagtaagatagtaaaatataagaaatataaataaaatggcaactaatttttgtttttgcaccttcgggtgcttttttgtataataaattatagtaattccttaaattaaaaatattaatggaagaggttttttatgataattataaaaaatgggtacgtaattgatcctttaacaaaacgtgaaggcaaatttgatattttaatagatggagaaaatgtagttagaatatcacaggatataggaattgatgatgatatagaagttattgatgccgaggattgtatagtttcaccaggctttattgacattcatagccactttagagatcctggttttactgaaaaagaagatataattacaggggcaagggcagcagctagaggtggatatacaacggtaatttgtatggctaatactaatccggttgttgataatgtggaaactttaagatacatagtggataaagcaaagactgcaaaaatagaagtacttcaggtaggaactataacaaagggaatgcagggagttgagctagtagatatggaagctctaaaggaagccggagctgttggattttctgatgatggaaaacctataatggattcaagacttgtacttgaggcaatgcaaaaagccagggaattagatgttccattaagttttcatgaagaagaccctaaattagtatatgaaagtggaataaatggtggaaaagtagcagaaaaacttaatatgatgggagcattagaagaagctgagacagttctaactgctagggatgctgcgcttgctgtatcaagtggtgctaaaactaatatacaacatataagttcaaaaatatcattaggtattataaagttggcaaaagaaatgggagctaacataatagccgaagctactcctcagcattttagcattacagaagaagagatactaaattgtggtactaatgcaaaagttaatccaccacttagacgagaagatgatagaaaggcaatagtagcagctcttaaagacgatactatacaggttatagcaacggatcatgctcctcatactaaagatgaaaaagcaagggaatttaaggaggctccaagtggaatgataggactggaaacggctctttcacttgcggtaactaatcttgttaaaacaggggacttaacttatagggatatgatatcaaagttaacaataaatcccgctaggttttataacttagatagaggatatataaaagaaggtcacagagcggatattgtaatatttgatcccgatgaaaagtacactgtaaaggaagaggaatttcaatctaaagcatcaaattctccttttataggtaaagagctttttggtaaggttaagaccactatatataatggaaaaatagtatatgaagataaatagaggagcctataggcttctttatttagttaaataatctattacataattattagttatagacaaattagaaggaaattcgttagtacgttttgacaaaattgagaaatagcctgtatcctcaaagttatctgaaattttggtattactaaaccctagcctttttattaattcaatgtaaaaagacttatagttcactatatcccttgaagttaaatgaaagattcctctcaaattatgatttattatataataaagctgttttgctattattacatctatagttgtattaataaagagttttggatataaagtgatttcttcattattttctaaggaatttaatagattagccattcgttttgaagtttttccccaaacttgaggaattctcaatatacaacaattgtcatcaagtatctttataagtttattctcacaagctattttatatttgccataattggtttgagaaattggaatatcgtcttcaaaatgtggagtatttaaatttccatcaaatacatttgtagtggagaaaaaatacaacttcccgccgttggttcttaaaaattctcctgcccttatgtgagtaagtagctgtttcttaaaatcaccccttaaacatgaaatcacaatttcagggttgattttttttaatagatgtttcagagtgtttaaatcgtcaatattaagtttaaaattgccctttgtattatattttatttggtttgtaaagtatgttgcatatatatgaaaagcagtatcaccagcaaactgatttattattgcagaacctacaagcccgcttccacccaatattaaaattttttttataaaactatcaactccttattttattatagaacataatattttagtacaacaatatgatttgcaaatacattgaagtaattgtgaataaaagttccttaaagagtagaaaatacaataagtgatatatagggtttataaacttgaacttgtgatttggagtataaaaaatttctatatttaattaagaataggaggagaaaataatatggcaacaaaattgatgtgcagcgcaggtacatgtgttaataatattagtggattgtgtacagcgaaaactattaatgtgcatggtataaaggctagatcatctattgatacggaatgtgaaacttttgcagaaaaaggaattaaaaatgctctttcaaatttagttaatatgaatattccaggagaaatacgacaggtatttagcagaaattcaatagaaatgagtcctgaaatacaatgtcaggctataaattgctcatataatcataataaactatgtgcagcaaggaatgtacaaatttacggaccaggagctattacaagtgaaggtactgaatgcgagactttcacatcaaaaagctaatgaaaaaatcagaactagtgcatgttttaagagaaaccactagttctgattttttatttatgcacctagttcgagaaccttatttttaattacctgtattacacctgattcatcattactttttgctataaatcttccatgctttttaactccatcaggagcattttccataacataactatgatatacactttggagcattgaaacatcattataataatctccaaaagccatagtttcgttttcatttatgttgaatttatcttgaaggaactttatagcagttcctttgtttacatcatttcttccaatgtcaagccatatatcccctgatacagtgagttgaaataatttgccccactttggagaaagaagtacattagaattatttgcagaacctttataatcacatattgctatcttaaaaaattcatcgtcaatttcatctagactgttaacaacagcacttttatgataatacttctcgacctcttctataaatgcagaagatttgtccaaaacatatgcgctctttttgccgcataaaaccaatttacagtcaggaactttttttgcatcatctacgactttagataacatatctctatctaaagtttttgcaaacaattcctttccatctttaactatgaaggcgccgttttctgcaataaatgtaattttatcttcaaaaccagccatattatcttttaaggtaaaatattgtcgtccactcgcaacgctaaacattatgttcttattcaataaactatctagtataagaggaaattcattagggaattcgccgttgctccttagaagtgttccatccatatctgtggctattaattttatcatatagttacctccaatatttctataaatactaacattattataacatacttgtattaagtttaatgtatgaactttatggatatgttataatatatagaatgcttaaaaatcaattaaattgaagtttgaaaggtgagtttatggagaaagttattccagttaaaaaaaataatgattatgaaatttacatagatgattttggaaatatgggagaaggaattggcaaaatagataatttcactgtatttgtaaaggatgcagtgaagggagaaaaggtaagggcaaaaataataaaggtaaataaaagttttgctataggaaagttgatagacataattgaaaaatcacaagatagaactgagccagtgtgttctatttataaaaaatgtggtggatgtcagcttcagcatttaaaatatacagaacagcttgagtttaaaaaaaataaagtagtagaatgtcttaaaagaataggaaaattagatttaagttctgtaagaataaatgaaacaataggtatggaagatccttatttttataggaataaggttcaacttccagtgggagaaacagctggagaagcgaaaataggtttttatagagagagaagtcatgaaataatagaggttgataaatgttttatacaagacgattctgcaaatgaaataatactcttgataaaaaggtggattaaagagtttaatatagaaggatacaatgagtattcgggaaaagggactttaaggcatataatgataagaaaagcttttaaaacgggacaaataatgctggttttagttacaaatactgaaaatgttccacataaaaaagaacttatccacatgataactactgaaattcagggtataaaggggataattcaaaatattaataataagaaaactaatgtaatactaggtcaaagagaaataactctttggggtgaaagtactattgaagattatatcggtgagtttaaatttaatatttcctctaaatcgttttttcaagtgaatccaattcaaactgaaaagctttattctgcagcgcttaaatatgcggggctgacaggtaaagaagtggtatttgatgcttattgtggtacgggaacaatttctctatttctatctcaaaatgcaaagaaggtatatggagtagaaataataccagaagcaatagaaaatgcaaaaataaatgcaaaacaaaacggcatagaaaatactgaatttattgttggaaaatctgaagaggagataccaaagcttatagaaaagggcatagcaccagaagttgtagttgtagatccaccaaggaaaggctgtgaaaagtcacttttacattcaattgcagaggcatcgcctaaaacaatagtttatgtttcctgtgatccagcaaccttatcaagggatttaggaatcttaagtgagcttggttatgaagttaatgaagttcaaccagtcgatatgttcccaatgacggggcatgtggagactattgtgttgataaaacgagtagataaatagaaaacaattattttaggcattttttcaaacatatcttttctcttaatttagatgttcagaaatgagcgtcttttttcttgcaataaaatcaaaagtaaagtgatatttatgacatgaattacttcagtttgtatatttccatcaaaagaaatataataaaattatggaggtgtttgttaagcgtagattatataacgacaaaaaaaccagctaagattgggaaataacagacaaagtggtagcatattattgctcttttgggcggattagggtagctaataaaatgggaaatacatggcttgttccggttgacgccgaaaaaccaactgatggacgatacaggaacagtaaagtaggagatggtgaaaataaatgaaacatatatttttggttgaggacgataaggcgatagctaaaaatcttacacttttgctgcgctcagaaggatttacagtaaaccatgcctctacgaggagtgacgccattggcgctcttgatggtaataaatttgacttagcgcttatagatatttctttgcctgacggaaatggttttacggtttgcacggaaatcaaagaaaagcaagatgttccagttatctttcttacggcttccggagatgaatcaagtgtcgtaactgggcttaatatgggggcagacgactatataacaaagccctttcgtccgcgtgaattgattgcacgaattagaaccgcactgcgaaaaagtgggagttctccttcttcttttgaaatatgtgggcttcatgtcgatacggcgagcggaattgtaaaaaaggaaggcagagagatttttctttcagccctagagtaccgtttactattggtatttattaataataacaaaagcattatcacaagaagtagactgcttgacgaattatgggatgcagctggagagtttgtaaatgacaatacattgactgtatacattaaacgactgcgagagaagatagagaacaaccctgcaagtccggaaattattttgactgttcgaggaacgggatatagattggggaacggttatgcttcggaatagagagtttaagaagtttgccattttaatctctttaatagctacagcaactgtgacgattggatttgtgatcaatatgtcagctggaatacttacgattacttcctctgctgcctttggaacagtgttttttgtgtttactaaggctcgatataaaagtattgctcagatttcagatcaaattgatcttgtacttcataacgctgatcatttgtatattgctgaattggaggagggcgaactttccattctgcaaagcgagataacaaaaatgacgctgcgcattagagagcaaaatgatgcactgaaaaaagaaaaagagcatcttgccgattctatggctgacatagcccaccaactccgcactcctcttacatctgtgaaccttattttgtcgttgttagagaataaaactgacccaaatgataggaaagcattgatgagggaaatagaggaattgtttgtacagatggattggctgcttacttctctcttgaaattatctcgtctggatgcgggcattgtggtgttccaaagcgagcagatagatgtaaataaattgatatgcaacgcaattcgaccattcttaataccaatagaactgcacgatattaatttgaaaataaatgcaccgaaagggatggttattcaaggcgattcaggttggctttcggaagcaattcaaaatatcattaaaaattgcatggaaagctcaggcgataacggaaagattgagattgtttgtggtgacaacccactgtttaccgagattatcatccacgatagtggcgaaggttttcaaaaagaagatttatttcacttgtttgacaggttttatcgcgggaaaaatgcaggtgccacaggatatggtattggattagctctctgcaagatgattataatacggcagggaggtacgattactgccaaaaatcatccaaagggaggcgcgatattttccattcgttttccaaagtgacgaatctctcacctaaaagtcacagagatgtaagttgaatgttctattatatgggtaaaacataagaaaggagactcacataatggagttcttaaaagttgaaaatttatgcaaggtctacggcaagggcgaaaataaggttactgcacttgacaatatttcacttacaattgaaaaaggaggatttacttcaattattggttcctctggctccggaaaatctactctactgcatgctatagctggtgtggatgtgccgacaagcggaaaggtgtatctggaggggcaggatgtatatgcccaaagcaatgaaaaactcgctatttttcgcaggcgccaggttggactgatttaccagtttcataacctcattccaactctgaatgtagtggaaaacatcaccttacctatattaatggacaagcgaaaggttaacaaagaacgactgaatgaattactggaattgcttgggttaaagggacgagaaaaacatttacctaatcagctttcaggtggtcagcagcagcgtgtttccataggacgtgctttgatgaatgccccagcagtcatgcttggtgatgagccaacgggcagtttggatagcaaaaatggacatgaaattataaagctacttaaagaaagcaataaaaaatacaatcagactcttattgtcgtaacgcatgacgaaaatattgccctgcaagcagatcgtattattggtatatcagacggtaaagtagtacgagatgagagggtgagagcatgaacgttttcaacaaagttgctttgcaaggcatgaaaaaaagccgtacacgaacaattgtaacagtgattggagttattctatccgtcacactgattacgggagttaccacatttggtatttcattgatgaattatttggcaaaaggtgaagctcagaaatacggcggctggcacgttaaatttgaaaatgtgaattcttctttcgcatcgaaacaggcaagtaacgacaaagttgcaagcgttgcaacatttaaaaatatcggctatgcaaaacttaaaggcgtaaaaaccaccaataagccgtatctttttatagctggatacagcaagaaaaactttaatgctttgccgcctatcctaatggttatgggcaggatgccccaaaatagcagagagattgttgtccctggaaaagttatgacgaaaggtggagttaaggttcagttgggcgacaagtttaccattgatgttggaagccgcatgaaggtcaacaaaagccttggtcaacacgacccttacatttcgggaaaagaaactcttgtgccaaaagtaaagaggacttacacggtggttggtatctctcaaatgccaacatttgatgaagattctgcgccaggatataccgcaatcacaaccgcggatgcagcagacacgatggatgatctcagcttatttgttacgttgaaaaatccgcgtgaagttcatacttatgcaaaaagcacagctgaaggtcatgcttataccttgaataatgaagtgctgcgcttcatggctctttctaatgatccgggtgataaggtttttaatgcatttttatactcagttggtggcattgtagttgtgattatcatgattggttcgatttttctgatttacaattcatttaatatatccttgaatgagcgcacacaccagttcgggattctctcgtcagtgggcgctaccgcaaaacaactgcgccgttcggtgctgtttgaaggtatttgtatcggcgccattggcattccgattggagttttagtgggcatagccagcaccaaacttgtgatggtagttgttgccaagcaattttcaaacattttctttgtcggtgtacctttcactgttatggtgtctgttcctgcaattctggcagcggtggtaattagcatgattacaatccttatttcagccgatattccagctcgtaaagctgccaatatgcctgtgatggaatgtattcgtcagactaacgaggtcaaattggaagctaaagaagttaaaacctcaaaattggcacagcgcatttacgggtttgaaggtgtgcttgctcttaaaaacttcaaaaggaacaaaaaacgttaccgcagcattgtgttgtcacttgttttaagtgtagtgctgtttatatcgaccagtgcaatggtagcagatttgaaacagacgacagcgggtgcaaaggagattaatggttatgatattggttttggttcagatgatatgaaggacagtgaaatgctgcagctttataacaaattaaaaaccaccaatggtgtttatgaaagctcgtatcaagttgttatgaattattcctgtgctgtcaaaggcagcgacttttcagatgcatacaagaaatctgtgagttcacattcgctggacaaaacagtgaatctgtcaacgataatccagtttttggatgacagtacttatttaaatattgtcaaacgcttgggcttgccaaagaaggaatatataggaccaaatgccaaattgataagtgtcgccaaagtggatagtgatcacgacaatcagaagaacgttcaccagcttcctgatatgttcaagagttcttccatgaattttacaatcgctcctgaaataaatggcaagccggagattaggcagggacgtaatgtaagtattacatttgttagcaccatggtgatgcctgatattcctccgagtgtaagagtatcacttaaaaagccaagtaagcttagtttgattgcaccatattcactcaaggaaaagtttaatacctctaatatttctgcggatattaacgctaagggcatgacttttttgtcaaagaatccctcgcagtcagcggctaaaatggaagaggcaattaaaggtgcgaaaattaaagatatatacacccttataaatagtaagaaaatatttgaggaaaacaaaaatgaaatttttattgtcgacgtattttcttatacttttataattatgatttcgctgattgcagttgccaatgtatttaacactatttctacgaatatcaagctgcgcaggcgtgaacttgccatgcttcgctctgtgggaatgtctgaccgcgatttcaaaaagatgatgaatttcgagtgcgtcttttatggaatgaaggctctgctcctcgggcttcctctgtcaatcatattctcatggcttgtgcacaaagtaatgagtggcgacagtacccattttgtattgccgtggagtagtattggaatcagcgtgttcggtgtgctatttatcgtgttcattactatgatgtattccattagcaagataaaaaaagaaaatatcattgacgctcttcgggatgacatggattaatttaaaacaaattttcttgattaactcctcattgacttttttgatggggaatagtataatggtaaaaaatttgaaatttgaggtgaaaaaatgattaaattttcttgctgatttttaaaagtacatttaatacaaagataataggtgtgttctgtttttttgttgtacttatgcaggaaagttattcttttttcttctaatatatacttgtgttatgctataataattagcttaactgtgtatatctaagggctgtaaggataataaattcttgcagctcttacttttttataaataattagaataaggaggataaataatattatgatagataaagatactttgctaacacatgataatctccatatagactcggatactgcaggtgatatttatatggagtaataacaagatcacctattgttccgaatttgttttttatattattaaatacagaggaggacaaaaatatgtctttaattaatgttacaaatttaacctttgcttatgaaggtagttatgataatatttttgaaaatgtaagttttcaaattgatactgattggaaattggggtttactggaagaaacggtagaggaaagactacgtttctaaatcttttgcttggaaaatacgaatataatggaagcatctcgactgatgtgaattttgaatactttccttatgaagtgcaggagaaaggcaaatttgtcatagatgtcataaaggagattagtccaaattcaatggattgggaaatagtaaaagaattatctttgttagatatagactatgaagctttatatagacagttctatactctctctaaaggagagcagaccaaatcattgttggctgctatgtttttgaaagagaattcttttttgcttattgatgagcctacaaatcatttggatgctgaagggagaaagaaactaagtaattacttgaaaaagaagaaaggatttattctaatttcacatgatagatcttttttggataattgtgttgaccatattttgtctattaatagaactaatattgaaatacaaaaagggaatttttcttcatggtggagaaacaaggaattaaaagatgggtttgaactagcagaaaatgaaaaattgaaaaaggatattaatagactttctagctcggcaaaacgtacatctacgtggtcagatagtgttgaaagtagcaagtatggaactactaattctgggagcaaattagataaaggatatgttggacataaatctgaaaaaatgatgaaacgtgctaaaaatatagaagctagacaacaaaatatgattaaggaaaaatcaagacttcttaaaaatattgagaataatgaaaatttaaaaatagtaccgcttacttttcatgataaaaagcttgtagaagttatagatgttgcaattaaatatgatgatagaattgtctgtgaaggagtaagatttaatatagagaaaggtgaaagaattgctattcaaggaaagaatggcagcggaaaatcaagtatattgaaattaatttatggagaagacatcccacatagcggaattgtaagaaagaataataaattaattatttcatatgtttcacaagatacatcagatttatatggtaatttatctgagtatgcggataaatactgcattgatgaaactttatttaaatcaatgcttagaaagcttgatttttcaagagaacagttcgaaaaggatatcaaggattttagcggaggacagaagaaaaaggtactgcttgcaaaaagtctgtgtgaacgggcacatttgtatatttgggatgaaccattgaattttattgatgtcatttctcgtatgcaggttgagaaattgttaattgaatatgaacctacaattttgtttgttgagcatgatatttcgttttgcgagaatgttgcaacaaaaacaataaaattataaaggtttaaatgggcattaatgtaaaggtaacacacggaatcagatgttttggtgatgactgtatggagtatagtataggtctttaattatactgggtttccctgataactattgatagttatcagggagcctacataaagcaaatagtatcaaattgatacaaaaagataaaaaataacatattactggacggtaaaaaattgattatctaaaggaaatattttcttgtaatagaattaataagtgactatacaggaatagcaccagcagtaagcattaaatttataaggttattcattttttaaaaactagaaattattattgataaaatatctaacagtattagtgcataatattattagcaaaatgaggagaaaacatgattaaattattaaagcgtttgagagttagagagttgatccaagcatttatcagtttagttttcatagcagcacaggtctggttagatttaaaacttcctgattgtatgtcagatattacaagacttctgcaaacacagagaagtgaaatgtaagatatatgttagcaggtggaaagatgatgctttgtgccttatgtagttttgcagctgctgtagtggtagaattttttgttgaaagaattgaggcttccttttcgcaaaattttagaagccttttgttttccaaggtagattcttttcaatggaagaaataaaccgcttttcaacagatagtctgataactcgatcaacaaatgatattactcaagtacagatgctagttgccatgggtttatagacgctaatcgaagcaccaatcttaggagtatggtcaattacaaagattgagggaaaaggatttgagtgaacggttgctactgtagtaatgctaggaattatggtttttgtgatatccatgattatgatttttgttattccaaagtttaaaaaatgtaagtccttactgataatctaaaccgtgtaacaagagaaaatcttacaggattacgggttgtaagatcatataatgcagaagactatcaggaagaaaaatttgaaaataccaataaagaattaatgactacgcagctatgcaccaatcgtggcatggctgttatgatgcctatgatgatttttatcctgattccaagagcttctgattatgttctggaaaatataagcaatagtgctttcagcttaaatattacaagtaaaaaacactttgccattaagataaaaagaatatagttgacaattagtctaattagactataatatttaagtatggctagtctaattagactaataataatttcaaggtttttgatatttagaaaaacttaatgaagcagtaaagtaaatagaaagaagggcttaaagtggttaaatcgtttttgatgttagggcagtcaaatatggctgggcgtggttttattaatgaagttcccatgatttataatgagagaatacaaatgttacgtaatggtagatggcaaatgatgactgagccaatcaattatgatcgtcctgtttcgggaataagtttagcgggttcatttgcagatgcatggagtcaaaaaaatcaagaagatattattggattgattccttgtgctgaaggtggaagttcaattgatgagtgggctttagatggggtgctttttagacatgcattaaccgaagctaaattcgctatggaaagtagtgaattaacaggaattctatggcaccaaggggagagtgatagccttaatggtaactacaaagtatattataaaaagttacttttaattattgaagctcttagaaaggagctcaatgtcccagatattccgattattattggtggcttaggagattttttaggaaaagaaagatttggaaaaggctgtactgaatataatttcattaataaggagttacaaaaatttgcttttgaacaggataactgttactttgttacagcatcaggtttaacttgtaatcctgatggcattcatattgatgctatttctcaaagaaaatttggtttacgatattttgaagccttttttaataggaaacatgtattagagccattaattaatgaaaatgaattgctaaatctaaattatgctagaacacatactaaagcagaaaagatatatataaaaagtatggattttgcattgggaaaaatatcgtatgatgaatttacatctgaacttatgaaaatcaacaatgattaaatattacaagtataaaggagctattaatataaatttaatgaagaacataaaggagatgtttttttgataccattactaattttaggtttattaaaacaaaaaccaggttcttacggatacgaattattagcgttaatggaagagagacattataagtacatagtaaatttcaccaaaggatcattttattataatcttcaacaattggaagaaaagcaatatataaaaaaagttaaccaattagacagcactagagagaagcgtaattatatcataacagaactaggagataaagaatttgaaaaattgatgtataagtatggttctaagacagattatataaacctatctttttatgctgctatgttatttgctaatgagtataaaagtaaggaattaacaaaactaatagaaaagcaaatcgaacaaacaaaaaagaaaatttttttattagagcaatctcttaataataataaagctatacctacttatttcaaaaagatgttagaaaattcgcgttctcatcatttggtaaatcttcaatggtttgaaggattattaaatgatataaaagatcaaaattaattataagagattatctgttatttatgaggctatatactgatatttacaggaaacttttaagatgttataatctagttaaaaattagtttgaaagataggaagtaaacatgagattagaagaattggttaataataattacaataagctcaatgaaaacgatctccacatatggaagtatatatgttgtaataagcgtgagtgttgtacaatatctattgatgaattagcaaaaaaatgtaatatttcaaggacaacaatttctagatttactcaaaagctatctttggaggggtttggagagtttaaagttaggttaaaactagaacttggcgtgagtaataattttaaaagcagcagtgttgaggatgtttatcaggattattacaaaacaataaaggatatgaaggaaaaggattttttagaaatatgtcgtatgatttatggagcaaaacatctttttgtatatgggactggggcggtacaaattgcagcagccaatgaacttaaaaggcattttataagtgtaaataagttttttgttacagtacacggagaagctgaaatgaatatggttctagagacagctactgatgaagatttaattgtaattatatcattatctggtgaaaaaaaatctgcggttgaatatttgaaaaaagtaaaggtcaagaatataccatctatttctattacaaaattatccgacaactcaatagcgaggttatgtgacgagaatttgtatattattacaagaaatataaaaatagaaggagtggttacttgtgaaaatgtaggccaatacttcattttaattgagatattatttctaaaatatattacttacttaggacaattaaaaaaagaggatacaatatcataggatgtatatgtaaaaaagttagcacaatatttatgtgctaactttttgttttttatataaatattgaaaagatagcctgtgcgaatgcacaaattatgtgcgaataacttaaagatgtacataagaagtaaatgggtgaaaagtattgaaaaggttttctttagttgataatataaactcatacaagatatcttggtaagaaacattagatcacagacataacaatttgggctaaattatgaaacaaacaatttgatacaagttataaggaaggtaatacagtacgataattgctttcttaaaaatatcacaatagttattgataaaagatttgagggggtcaaaaaatgatgcaaaaaattcagcgctttggagctgccatgtttgttccggttttattctttgctttttatggtatggttgttggattttctattttgtttacaaatcaagatattatgggttccatagcagcaaaaggtacagcatggtatagcttttggtatgtagttcagcaaggtggatggacggtgtttaatcaactacccttattgtttgtagttggattaccaattgccttagctaaaaaagcacaagcccgtgcctgtctagaagctctattaatatatttaacatttaattattttattaatgctattcttactatttcaggttcaagtttcggagttaactttaatttacaacctggagttagccatggggtatcaagtgggcttgcattgattgcaggcataaagacgcttgatactggtatgataggtgcaattttaattgcaggtatagctgtgtatctacatggtaagtttttcgaaaagagattaccagtttacttaggtatttttcaaggttcagttttcgtggtgatgataggatttttcgtaatgctaccaacttctttgttaatgtgtctagtttggcctaaggtccaatgcggcataggagcgttacaagggttcttagcttcatctggagttataggcgtatggatatatacatttttagaacgtatcttgattccaacgggcttgcaccattttatctatggaccatttgtttatgggccagcagtagtacctgatggtattgcttcatattggccaaagcatttatcagattttgcaacaagtgctcgttcattaaaagatatgttcccagccggcggttttgcactgcatggatcttctaaggtatttggatgtactggtatagcattggctatctacagcactgcaaagcctgaaaagaaaaaaattgtagctggtttacttataccagcaacaataacagctattgtagcgggcattactgaacctcttgagtttacgtttttatttatagctccagcattatttgcagtacatgctgtgttggctgcaactttagcggcaatagaatatgcatttggtgttgtaggtaattttggagggggattaattgattggtttgcacaaaactggctgccattatttaagtatcatccagttacttatataactcaaataataataggattatgttttacagcaatatatttcttagtattccgtttcttaatattaaagtttaattttgctactcctggacgagagatagatgatgaagaaacaaaactttatacaaaagctgattataaggcaaaacaaggcgcagctgaggaagttaagaatgatgaaatagatggaagtcaagctatgcaatttttacaagccttaggtggaagtgaaaatattgcagatgttactaattgtgcaactagactgcgtgtatctgtaaaagatgaaagtaagttattaccagatagtgttttcaaaaaagctggagcacatggagtggttagaaatggaaaagccattcaagttatagttggattatcagttccgcaggtaagagaagagtttgagggattacttataaagtcataaattagtattaaataaataatcaatttgttatctaaaattaataaaaatagatatttatatttaaggaggaaaagattatgaaaaaattttcagttgtaatagcaggtggaggaagtacttttacaccaggaatagtattaatgttattggacaatatggataaattccctataagaaagcttaaattttatgacaatgataaagaaagacaagcgatagtagctggagcttgtgagataatattaaaagaaaaggcaccagaaatagaattccttgcaacaacaaatccaaaggaagcatttacagatgttgattttgttatggctcatataagagttggtaaatatgcaatgcgtgaattagatgaaaaaattccattaaagtatggagtggttggtcaagaaacttgtggaccaggaggaatagcttatggaatgagatctataggtggagttattgaaattcttgattatatggagaaatattcaccaaatgcatggatgctaaattactccaatccggcagcaatagttgcagaggcaacaagaaaactaagacctaattctaaaatattaaacatctgtgatatgcctataggaatagaaacaaggatggcagaaatattgggattagagtcaagaaaagaaatgacagttaagtattatggacttaaccacttcgggtggtggtcagatatacgtgataaagatggcaatgatttaatgccaaagttaaaggaacacgttaaaaagtatggttatgtagctgaaaatggggatactcaacacactgatgctagttggaacgatacttttgctaaagctaaagatgtatatgcagtagatccaagtacattgccaaacacttatttaaaatattatttatttccagattatgtagttgaacattctaataaagaatatacaagagcaaatgaagtgatggatgggcgtgaaaaatttgtattcggtgaatgtaaaaaagttatagaaaatcagtctacaaaaggttgtaaaatggagatagatgaacatgcttcttatatagttgatttagcaagagcaatttcatataacacacatgaaagaatgttattgatagtacctaataatggatcaattgaaaactttgactctacaggtatggtagaaataccttgtatagttggaagtaatggaccagagccattaacaatgggaaaaatccctcaatttcaaaagggcttgatggaacaacaagtttctgtagagaaattagtagttgaggcatggaaagaaaaatcatatcaaaagttatggcaggctataaccctttctaggaccgttcctagtgcaaaagttgctaaacaaatactagatgagttaatagaagtaaataaagattactggccagaattaaattaataaagcatatagtgagtgaaaacaattaaaattttcaagaaaagtactaatcgaataggttggtactttttttatacagaagtgggtaagatgagtactaacagttgataaaattaatcccccaacttaattatatcatatggaatttttaaataataggcttataatttgtgcttattgtgtgtattataggaacagatattattgataaatggtttacctatacagagaaaagaagaaggggtatgtgtatgaattcatatgtgcttggttttaaggaaattgataaaacaaagatttccatggttggaggtaaaggcgcaaatctaggggaactatctagggttgcaggaattttaataccggaaggcttttgtgttactacagaagcatacaagaagataattgaaaaaagtaaggaatttaatgagttgttagacgaattatcatgtcttagactggaggatggggaaaaagtttatgaagttagcaagaaaattcgtatggtcattgaaagaatatccattcctaaagatatagtagaagagattgatgtgtatctcacaaggttaggtgaaaaagatgcatatgctgtacgttccagtgcaactgcagaggatttgccgacagcatcctttgccggacagcaggatacatatttaaatattattggtaaaaagtcaattttagaacatatcagtaagtgctgggcatctctatttactgacagggcagtaatttatcgtcttcaaaatggcttcgaccaccgaaaagtctatatatctgtggttattcaaaagatgatatttccaaaggcagcagggattttgtttacggctgatcctgtgaattctaataggaaggtgttatctattgatgcaagctttggtcttggtgaagctttagtttctgggttggtgaatgctgatatgtataaggtgctgagtggtaagattaccgataagaaggtatctaaaaagaaactagctatttatgcttcaaaagatggtggtacaaaagcacaagagcttgagattgaaaaacaaaataagcaagtgttgacagaagagcagattttacagttggagcatattggcagaagcattgaggaacattttagctttcctcaggatatagagtggtgtttaaatcaagatacattttatattcttcagagtcgtccaattactactttatatccaattcctaaagcaaatgatgaagaaaatcatgtatatatatctgtgggtcatcagcaaatgatgacagatcccctgaaaccacttggaatgtctttatatgagttaacatcatttgggaacagatttaaagctggtggaaggttattttttgatgttacacaaatgttggcttcaaaggatagcagaaaaatgttattaaataatatggaacaacacgatcctctcatgaaagatgcattagttaccataatagaacgagattttataaaagctttaccaagtgataatgggaatcaaagtaaaagcaataaaggagtatcagcaggagagtcagagaatcaaattgaaaacaacccgacaattgtttctgatttaattaataagaatcaagcatctatagaagagctaaaagaaaacataaaaacaaaatcgggattagagttaattgattttattcgaacagatgtagaggagttaaagaaaattttatccgacccacaaagttcagctgtatttatgactgctataaatgcttcacattggataaatgaaaaaatgagggattggttgggtgaaaaaaatgcagcagatattctttctcaatctgtaccaaacaatattacttcaaaaatgggtttggagctactagagattgcagatgtgattcgcccttatccggaaataatagactatttacaacatgtaaaggatgataactttttggaggaaatagttaaatttaatggtggtcatgaggttaagaatgcaattttgtcttatcttagcaaatacggaatgagatgcagcggagaaattgatataaccagaacacgtttaagtgaaaaaccaattacacttgttcctatgattcttaataatataaaaaactttgagactggtgcagcaaatataaaatttcagcaaggaaaacagaaagctttagaaaaggaacaagagttattggaaaggttaaaacaattaccggatggtgaacaaaaggcaaaagagacaaaacgaatgattaagctaattcgaaattttataggttatcgcgaatatcctaaatacggaatggttaatcgctacttcatttataagcaggctttgatgaaagaagctgaaaaacttgcaaatataggtgctattcatgaaaaagaagatatttactatcttacatttgaagaacttagggaagttatacgcacaaaaaaagtggattacagtataataaataaacgaaaaaatgagcacaaattatatgaaaaactaataccaccacgtgttataacttctgatggtgaaattgttgaaggtgaatacaaaagagaaaatgtaccagagggagctattataggattatcggtttcttctggagttatagaagggcgtgcgcgtgtcattttaaatatggaagatgcaaatctagaggcaggagacatattagtaacttcatttactgatccaagctggacacctctatttgtatccataaagggtttagtaactgaagttggtggattgatgacacatggagcggttattgcacgtgagtatggtttaccagcagttataggagtggagaatgccacaaaattaataaaagatgggcagcaaattcgtgtgaatggaacagaaggatatgtagaaatactataaatattctttgatattgataaaaaaattttaaaaatatgttatgaagtcagtcggcaggttcatgcagttttcaatgaattggtgtaaaatttaatatatgtaagtttttaattggaaaaggaaggctataaatataatgtctagacattttatctaactgaaggaggaaaaaatgaaattaaaagttttagtagataataatacatatattgaccaatattatttaggtgaacctgctgtttcatattatattgaagacgaaagtactaagctattattagatgttggatattctgatatatttattaaaaatgccagtgcgttagatgtagatttgaaaaatatagatactattgtcatttcacatggtcatgatgatcatacaagagggttaaaatactattttgaacaaagtagtgtaggtgagatctctataattgctcataaggatgcatttaaagaaaaaataaaggataaattgaaaatatgttctcctattttacaggaggaactaagagaaaaatgtaatttgattttatcgaaagaacctaagaaagttagtgaaaacttaatatttttagggaaaatacctaagataaataattttgaaaatagaaaatccataggaaaacaagttgatggtggaaaattagtagacgattatgtaatggatgatacagcgctggcatataaaagtaaaaacggtatttatattattacaggatgttctcacagtggtatttgcaatattgtagaatatgcaaagcaagtttgcagggataacagagttataggaatcataggtgggtttcatttatttgaagtaaatgagcaagtgcagaaaaccatagattatctagtacaaaataatataaaagagttatatccttgtcattgtacctcgtttttagttagagcagaaatacataaaaagttgcctgtaaaagaagttggagtaggactagaaattaactggtaataatatatatactttttaaagtatgaattagaaatttcaatactggggatataagtaagagtatataattgaaagggagttttagtatgaatttaactggaaacacaatacttataactggtggagctacaggtataggattagagctgacaaagcaatttgttgaattgggaaacgaagtaatcatttgtggtagacgtgaatctagattaaaggaagcaaaaaaagctataccttcaatacatactatagtttgcgatgtggcatcatcacaaagtagagaagaattaatgaacgagataaagaaaaattattctaatataaatattttaattaacaatgctgggatgcagcaagatgtagatttgacaaagggaatagaagacctcgttaaagataatttaatagaagttgatataaatctaaaagctccaatatatttggcaggtatgtttgtggaacattttaaggaaagaaaactgaaaagcacaataataaatgtatcttcagggctgggttttgtgccaatggctagggtgccaatttattgtgcaactaaggctgcaatgcattcttatactttgtccttaagacatcagcttaaggatttaggaatagaagttattgaagttgtaccgcctgcagttgtatctgaactaaatagcagcgcaagagcaaaacttggtacaaatgatttctcagtacctactaaagattttgtggcaggtgtaatagatggtctaaaagaaaatagaaaggaaataggatatgggacttctgaaaactttattaaggcgtcaagaaacgacttggatatagcatttgaaagaatgaataatagataagttaaaaaatactaagggcagagatgctcttttttatttgatataagttaagaatgattttagttagatataaataatatttttaagcatattacatttattacataaaaatcctgtggtataatgtggatataaagtataataagggggaattttaatgagaaaaaagtttagttttttattaattatttttatgatgcttctaaacgtaaattttacagttaaagctgcttcttttggttatggtagtttgaaaacatcagaaacttcatctaatgttttattcatcggtcgttttgatacaagcgatcctgctggtccaaagtttgcatggagtaacagtaccataaaggcaaattttaatggtacaggaataagtgtaaatttaaaatcttcaggagacaattggtttaatgttataattgatggaatagtaaagatgccagttaatgtaacttcaagtaactcatcacctattgtattagcagagggacttacaaatggaaaacatacagtagaattggttaagagaactgaagcgtcagttggagaagttcaatttttaggttttattgttgatggtggagaattaatttcacctccgcaacctttacaaaaaagaataatgtttattggggattcaattacctgtggatatggaaatgaaggtaaaagtcaatatcaatcctttacgacaaaaaatgaaaatgcatatctttcctatggtgccataacctctagacttttaagagctgaacctatgactatttgttggtcaggaaaaggtttaattagaaattctggaggaaacacaactgatttaatgcctgatttgtaccaaagaatattgccgtatacatcaacacctctttgggatacgaacagatgggtacctcaagtggttgtaattaatttatgtacaaatgactttagtataggtattccagataggacaacttttgttacagcctattcaacatttatagatcgtattcgcagtcaatatcctactgcacatatatactgtgcagtaggacctatgttaaatggagataacctaaaaagtgcaagggattatattaatagtgctgtagagatgaaaaattcttcaggagatcaaaaggttcattttattgagtttccagtgcaggattctgcaaatggatatggtgaggactggcatcctaccgtaaaaactcatgaattgatggctgttcagctttataaagcaattaaagctgatttaggttggtaaggttgtaaaaaatcaaaattgaataattaataattgccactcatttgttttgggtggcaattatgtttatataaaatgataagaatttaattgtaaattattaaaaggttactcattagttttaatactattaataaaaatataaaacaatatacattatatgtttataaaataatatatatgggttattatacttttaaaggaaattaataataaatatgtaaagaaaatttagaaatgaggagaaataatgatattgaacaaaagaaaaaaatactttcagctatgttagtatcagtacttttagtgtcgccaaaaattaatagtaaagtgtatgcttctataccatcaagctgtaaggcaggtgcttttcttggatgggctgaaaaccttgaaactaaggatattatgggtgatccagcttatagtggaaaagtaaatatggtagcttttgatgttgccaattggtcagataacgatagtgatgataatcacaaaaacaatgatgcaacagctattggggacggtccggcaggatggcataatgcaaattatgagacgaattttaaaaatgttgcagtgcttggtaaggatactatggtatctgcggaaattcctaatccagaaggccagaaatgtacaacacatatgagttcagatgacttttcaaaagtagcaaacgctaagataacagatagttcagattctaaagttgttacaaattaccaaagtatggttaaaaaattaggggatatactggctgattattactcaaatctaaatcagaaaaaccaggctgctaatgtgtatttacgcctttttcatgagatgaattcaagttacctttggtggggatttcaagataaagagcaatttaaaaagctttggataaatcttcatgattacttagtatatgatagaaaatttacttggttaaaattttgctacgctgtcaataaaggtgatgaaaatataggagatgagtacaaatacactaaagatgcaacgttatattatccaggagataattatgtagatacagttgccttatacggctatagtgatgatctttcaaatgatcctgacatacaaaaaccttatgcagaacttactggagggacatacaatggtgttacatataaaggctataataaaccatttggatttgctgagcttggagcaaaagttggtggaagctatattgataaagacaataatcaaataaaaccttttgattatcaaatatggagtaatgctattcaaagtgaatattcaaaggcttcatactcaatagtgtttgataaagcatatgatccacgtaataatattcatggaacttctatttttaatgattataaagatgcaaatacaagcatcagttataaagcacatgtttccaatattgggtggcaagattatgtaaaagatgctgaaacagcagggacaacaggacaaacattgtctatggaagctattcaaatgaactatcctaataatattgaattacatttgcaatatcaagcacatgtttctaatataggatggatgtcaccagtatccgatggtcaaatagcaggaacaacgggtcagcatctatctatagaagctataaatatttcattaaaggatgctcaaggaaaagattcatctgattactcgatatattatagaacacatcttagatatatgggatggacctcatggactaaaaatggaagtacatctggaacaattgggcaatctaggccagtagaagcaattcaagtatgtgttgttaaaaatggtacagaaagagcgcaattaatggaaggattagtgcaaggtactaaataactaatatatataattacttattaaatcattgaggatttacttggttaaaattctgctatcttgttaatagatatgattaaaaaacaataaaaacggataattatatggaagttattcaaatatgcatagttaaaaatggtacagcggcaccaagataataaacttagcatgaaattttataagcatagtgtattaaaaattaaataaatatgaatgccacttatttgttagagtttcacagtaggtggcagttatatttgtacgccaattaaaagtagaaacaaaaattccaataagtatagaattagcacaaaaatttaaaaagatatacgtttacatatacattacataaaaataatggaagtttacaatggcaatattatagtgtaatataatatactagcaaaaagttataaaaactttataaaaaaaccataatttttgtgtaaatagtaaaaaggagtaaaattatgacatttaacaaaagaaaaaggactataataagtcttctagcgacgacacttatactctcgccattagttactaacaaagtttatgcggtcccaacaacatgtacttcaggagcatttcttggatggggaaacaatctggataatccgtccattatgaatgatgctgcatatacagggaaagtaaatattgtttcttttgatcttgctacttttaataatgcaaactatgaaggctctatcagtggagatagtgctgctaaggttgcgccacttggaaaggatactattatatcagcagaaatgcctaacccagctgggggagatacacattcagatatatctgaccaagattttgcaactgtagctaatacaaaaattcaagatattaatacatcgagttctttgcttcttcaaaactataaaacaatgatttctagaataggtgatgagatttataattatcaccaaaaattaaatacatacaacgctaatgcaactatttactatagacctttccatgagatgaacgcaagttggttttggtggggagagcacgacagtaatcaatttaaacagctttggataaatattcatgactatttggtaaatactcgtggtttaagttggttgaagttctgctactctgcaaatgaaagtattactactgattctaatgttaaagatgcacttgattattatccaggtggacaatacgtagataatgtaggattagacggatatagtgatgatcctgaaaatgatggagatgtaaagaaaacatatgctgagcttgttggtggaacatacaatggacaaacttatcaaggacttgggaaaccatttggatttactgagcttggaccaaaggttggtggagactatgttgacaccaataataggcagataagaccatttgattatcaaaaattgagtaatgccattgaaaaaaactatcctaaagcaggatattcaatagtatttgatggagcttatgatcctcgaaacaatattcacggaacttccctttttaacggtgctgagaaggaagatggaagtcttagctatgaggcccatgttcaaaatataggttggcagagtaatgtaagtgatggggatacagcaggaactgttggacaaggattacgtatggaagccataaaaattaattataacaataatttaggccttcatcttcactatcaaacacatgtccaaaattatggatggatgtcagaggtaaaagatggtgaacttgcaggaacaacaggacagagcttaagaactgaagctataaaaattatgttaaaggattcttcaggaaataatgcatcaaattactcagtatattatagaactcaagttgagaatatagggtggacaccttggaagaagaacggtgatgtatcaggaacaactggaaagggattaagaatggaatctcttcaaatatatgttattaaaaatggtacaggtgctgcgcaagctatggaaaagttaatacagagtggaaaatagattttgtaaaacaccaaaagtaatataaaggagtaagattatgatattaaacaaaagaaaaaaagtattgataagtatggtgacaatggtgggtatactatcaccattagctaatagcaaagtttatgcaattccaacaacatgtaattcaggaatatttgttggtagggctgaaaatttagacgctatagatattatgaaagatcctaactatactggaaaagtaagtatagttgggtttgatgtggctaattgttcggataataatagtgacgataatcataagaatcataatgagacagcaattggtaatggccctacgccaaaatggcataactctaattatacatctgattttttgaatgtggcacaacaaggaaaagatacaatgatatcagctacattacccaaccctgttcctagtcaagaaattggttcagtaggtcagatagcctatggttcgcaaatatccgatgctgattttaaagaattagctagtgtagatattaaaaatataaatcagtcaagtccttactttgttaggaactatggacaaatggttagcaaattaggagatataattgaaaaatatcatacagagcttatggatagcaatggtaatgcaaccatatacttgagaccctttcatgaaatgaattcaccttggttatggtggggatttaaaaatcaggatgactttaaaaatctttggatacatcttcataactacttagtgaatgatcgtaagtttacttggttaaaattctgctttgctgctagtgctggagatcctagcttagatccagcacatgtcaagggtgcaaattcatattatccaggaaataattatgtggatacggtagctttagatggatatagtgatgatccttcaaacgatagcggaataaaaaaacaatatgcagaacttacagcaacaggaaaaccatttggatttgctgaacttggtgctaaagttgacggggattttgttaatgtcccgaatgaaaggactcaacagaatgttgaaacaagaccatttaattatcaaaaatggagtgatgctattcaaaagtattattctaatgctaaatattgcatagtatttggtggtgcatatgaccctcgtaataatcttcatggaacttcactttttagtaatagccaggaaccaaatacaagtataaattatcaagcgcatgttcagaatataggatggcaagactctgtacaagatggtgatgcagcaggaacaattgagaaagccttaagaatggaagctataaaaattaattatcctaataatgcaggtttacatgtagaatatagtgcacaagttcagaataaaggttggatgccagcagtaagagatggagctatagcaggaacagttcaagagggattaagaatggaggctataaaaatttctctaaaagattctttggggaatgtttcaaatgattattctgtatattatagagcacaagttcagaataagggatggatgccatgggtaaaaaatggagctatagcaggaacagttcaagaaggattaagaatggaagctatagagatatacgttgttaagaataatacacctgtagctaattttatggataataaagtagcaaatgctcaataagaattttaaaggttaataattggaattttttaatgataaaaagatgctttcagaaattatatcaaatttctgaaagcatcttttatttttagaatatataaaactaatttttagaaaattcaataatgaaagttatatggctcatccttttttaagaacaatttttgaggttgttataactctttatatgttacataatttatataaagtgttaggggatgatgaaatggatttagaggaaatgagcagtttttttaacaaacgtgttaatgaatatgaggaacatatgatgaataacgtagggggagctaatcaatattatattgaaactgcaaaactaattcctagagggaaagagataaatatacttgatttagggtgtggaacgggactagaattagatgagatttttaaaattaataatacagttagagttacgggaattgatttggctgaaaatatgctaagaaaaataaaagaaaaacacaaagataagcttgatagacttactctgattgtaggagattatttcagctgcgatattggagaaaaggtattcgatgcagctttatcggtagaaacactacatcattttaatcatgaacagaaaattaagttatacaaaaagattgtaaggtcacttaaagataatggggtttatattgaagctgactatatggcgcctaatcaggattatgaagatcactgttttaacgaaaataaaagaatacgtttagaattaggaataaaagatggattttaccattacgatactccatgtactgtagagaatcaaataaaaatgctatataagtcgggctttaaatccgtagagaaagtatttaaggccgaaaatactgttattttacttgcaaaaaaataatttgaaatttgctttaagatatcttaattaattttaagagtacttaaagcttttttttacgcaataatgaaacaaaaatgtggagaataatcatgattttattataaatataaacaataatattatttattgtaatttattataacaaaatgtaagtttttgttgcgatatacgatataatatatatggtagatatataaaaaataataattaaaggtaatttataggaggttttattatgaagttaatggattggaaagtatctaagaaagtaggtgtttgttttttatgtataatagcatgttttacaataattgtacttattgatatattttctatgaagaacatagataattcgtcatcaaaggttacagagaattacatgcaaagtatcattaatcttcattacataaataatgatatgtataaattaaaaatatatgcaaatgaacactataccgctccagatgataagactatgtcagccatagatgatagcataaagagtacaaggactaatttgaaaaataacttaaatgcatttagaatgacactaaatgagggagaggaaaaagatgtatttaacgaggttgcggaattatgggaggattattcaaaggtatacgacaaaagtatggagttatcacgtgagaataaaaatgaagaagctttaaaactttattgggagaaaatgaagggagattctaataaaattcaaaaaaaattagatatgatgttaaagacaaatattgacgaagcttctcagcagaaaacttacataaaaacggttactagcaggggagagtactttgcagttgagggactaatagttgcagacattatagcaattatacttttattatcagtaaataagttaattgctaggcctatagtcaaggcaagtagagcaataaaagaaattatttctgatattgaaaataatgatggagatttgtcaaaaagaatttatgttaacacgaaagacgaaattggagagttaacgcttggagtagatgcatttattgaaagattagaagatataataggaaaaatacgaacttcatcagctactttggagggatcatcaaaattactccttgaacaaattagttcttcgaatataaaagtagaagaaacttcggctacagttcaagaaattgctgctggtatggaagaaactgcagcctcagtagaagaaatcaatgcatccacagatgatattgagaatgcggtggaaaaaattgcactaaaagcacaaagtgggtcagtagcaacacaaaaagtaaattctaaagcaaatgaaataaaagttaaagctgtaagttcgcagaaggccgcaagtgaaatcatacaagtagtgcaggaaaatttagagaaggcacttgttaaatcaaaagatgtagagaagataaacttgttaactagttccatattagaaataacagaacagacgaatgtacttgccttaaatgctgcaatagaggcttcgagggcaggagaagcaggaaaaggatttgctgtagtggcggatgaaattaaggcacttgcagaggattcaggaagaatagcaagtgaaatacaaagtataaatagtatagtaatagaatcagttaaaaatcttgcaggggattctaaaagtgttttagattttattagtaaccaggtaataaaggattatgatatgtttgtaggtgtatctgaggaatatacaaatgatgcaacagctataagtcagttaatgaataattttaatgatactgctgatcaactgaaaacgtctgttaatggtatagttatagctataaatgaagtttctagaactataaatgaaggagcagttggaacgcaaaacattgcagaaaaagcatctcaattatctaatggtttaaaccaaatacaaaataagatgaaggctggtacagatgctatagtggtacttaatgaaaccacatctatgttttcttaataattaacagttaaatacagataaattgaaagctgcgaaatggtaaaagattttcgcagctttattaatattagtaatataatattaaaaaaatgtcgaaaaaaatcgaataaatgctttagaaataaaattttcaggcgataaaattaatcataacagaatataagaattaaattatagaggggagaaaaataatgaaaagcggtggcattaaagctaatctatctttgttagtaattttcatgttgatatttgcagtaggtttaggaggcttttccttttattcattgaataatattaaaagcgaaagcgagaaaaatgtagctactgttagtaaatatgttgttttagtagacggttctagagaggcacaagtaacctttaaaaagcaagtacagtcatggaaagatttattattaaggggttctgatgaagctaagtataatacttactttaaagagtttacagagtacaatgaaaaggtgacaaagcaattagaggaattgaaaggtactatgaaggaattaggactagatactaatcaaattgataaagtgtcatcagaaattaatcagcttcaagagaattattcaaatgcactgaaaagttatgataaaaataataaggacagttacaaaattgttgatgctttagttaaaggaatggatagagctccaactaatgatatggatactttggttggatcaattagaaagaactcagagactcaaatagctaacatgaagacaatatcagaaaataaaaataaaaaattagccatagagttatttgctattattgctataagtatgtgtatagttggtttacttacactcattacattaaaaacttataagagcattgaaaagtttatagaacaatttaaagcgcttatgaaaaaggcaggagatggtgatcttactgtagaaggagaagttttttctaataatgaattaggggacttaacaattaattttaatgagtttattaaaaaaattaaagctttaatattgcaaacaaaagatttgagtgatttactagcagcttcatcaaatgagattcttaggggggctgatgaaacggttaaaacttcatatgaaatagcagaaacaatatcacaagttgcggacggtgctacaaaacaatctgctctagctaatcagggaaatgatatggtggttaatgttacaaaggatttaaataaagttactgaaactaccaagtccatgaaggaattagcaatagaaacagataaagtacttacggatggtatctcaagtattaaaacgcagaacgaaaaaatggaggaaagtaaaaagactacaaaagatgtttcagaggctatattgaatctttcttcaaaatcatctaaaatagcagaatttgttgaagtaatcaatggaatttcttctcagacaaatttactggccttaaatgcatctatagaagcggcaagagcaggagaagttggtaagggatttgctgttgtagctgatgaaataagaatgctagcagaatcatctagcacatcaactactcaaatcgaagaattaattaaagtaattcaaagtgccataaatgaaactgttctaaagatgaagaaatttgaaaaatctatggaggaacagattgaggctataaaaaatacagagagtactttctgggaaataaaggattcaacttctaaggtagctaataaagttatagatgtttccaacagcactcaagttattgacgaaaattccatagcacttgaaagagcaatcagtaacatatcatctgtagttgaacaaaatgctgcggctagtgaagaggttgctgcatcaacagaagagcaggtctcttcattagaagaaataagtacattgattaatgatctttctaagtcttcagataatcttaaaaatcttttagaaatatataaagtgaaataaatatagtataatattaacaaaataaaagcatgtgtatagtatacacatgcttttattttgtggttgctaataatataattacatagccatatttggcatttttcctataatttctggatttaccataccgaatatcatagctatatgagctacaacaagaaaaccgccaacaagcataaaatgtattttcattttttcatttgctgttttatttctaaatattaagcctaactccattaaggctataggaagcaggaaaataactccactcaggtagaaaccaacagcaacaatatcaacccaagtatgccagccaccggtagaagttagtggtattacggctgtaagcattagatatataaagattccagtaaaataaataccagcaaatataccaacaattttgttcagagttttaagaccgcctctttgtactctgttgaagatgataaaaaattcagtaattgtaagagtttcagcacagattactggtatagccataaaaataattaagttccaaggctggttttgtgaaagtagagacatataatgtgtcatgttcataagttattacctccatgtagtttatgaatttatattataaaaaaaatatgaagataatataaagatttaagttgatgttgaaatactatagtgatagtatattaagaaattaaagtattaaaaatttataggaggatatgtatggcagcaagtataaagtttgagataaaagagcaaatagcagtactttcagaatcgtcgaagggctggaaaaaagaattgaatttaatttcttggaatggaagagagcccaaatatgacttaagagactgggatgaagaacatagtaaaatggggaaaggtataactttaagtaatgaagaggtaaaaagacttaaagagatacttaacgaaatgaatgtataaagcttcaaataatagaagtcataaaaaaaatctatcatcgtataattaggtgatagatttttttataagtttatttggaggaatgtttgtggaagataaaagaactgttgaatttgttttgggtcttataggaggaatatttggtataatttcaggaataggggcagttggtcttggaggactaggatccgctgttggagccagtggttcaacaactgttggagggctaggtattgtagctatattattttctgtattaggtatagtgggtgcagtatttgttagaacaaagggaaaattaggcggagcatttatgattatagctgctattggaggcttcatatgtatatcctatttttatattctccctggagtacttttaataatacctggtttaatgggattattaaagaaaaaccaaagtattagtaagaaataaattttagtaataaattgtacataatcatctgatttgattatgtgcaattcctttattgaaaaataaaaacaagtggaatacaatgtaagaaataagaaagtcaaattgtaaagatattcaataatgttttatagataaccatgatttagaaaggaactataataatgaaatttaattgtccacttatagttgtaaatgatattaatatctcaagaaagttttacgaagaggtattgtgtcaaaagataaaatatgattttggtgaaaatgtagtttatgaaggggatttttctttgcagttaaaatctcattttgcaaatatgattgatatagatgaaaaaagtataaaatttcaatctaatggttttgaattgtattttgaggaggataatatagaagcgtttctaaacaagctaaaacaaaataaaggtattaattatattcacagcttgctagaacatccgtggggacagagagttattagattttatgatccggatatgcatataatagaggttggagaaagtatggagggtgttattaaacgtttctttaatgaaggaatgtccattgatgaaattacaaaacgcactcagcaccctcttgagtttgtaaaaagagtcctacattataaattgacttaaaacattataaggaatctgagttagagcagcaatttgctctaaagacattccttctagttcaatttcgtcaaatttaatattgattaacttgaatgcaaagtaattagcttgtctttcaaatttacctttgtttgagaaagtaaatgcagcacaaagtaaatctggattacataaagcatgacctagttcgtgagatagaataaatttttccaaagacaaaggtaagttgtcttttataaagataatttcattattttgataatccctataataaagagcatctttttttctaagaagtatattgttaaaaggaagctttattactttaatatttaaacaatcgcaaagttcatgcacgtctctagttttgaaattagataccaatcctaggattatgttatcaatccattccattaacatcatccccaatataaagtattattttttatacttatagcctagtaattttagctgacttaaaagctcattggcaaattcaagtatttcattgttggtcattttatttatgtcataaccaccataagcagctaaagcaggttgttttacaataaattgcatagctgcttcaggagttttaaactcttcaaagtcatttgaattttcttggaaattttcattagaagttagtgatccagaggtattttgctcgtctgtaagtttatctacagttacatctaagacagaagctattttttgtagtgtatttatactgggatttttctttttgccacttaatatttcagataacgtcgactgacctatattagcttcttttgcaagtctatatttagtccaaccttttttagtcatatagaattcgattctatctttgttaaacatataaaagacctccgctgtaatatttcgctataagttaataataattgtaatatttcgctatgtcaatgtatttcgcaaaaattaaatataatttatagtaattaacttatataatagttgtaattatttcgttaatgagatagtatataaatatagtttcgctataacgaaatagagcgctatttagaaaaattgttatttaaccatataaatatgtatagggaggcgaagaaattgaggaatggttgtaaggaaatggaaaggcttttatgggattatagaaatataaaagctgaaataaaaaatttggagcttgaaattgaagcttcaaaagaaaattatgaaggactaatagctgttagctataaagaaaaaacagcagctacgaataaatttaattctgttgtagaaaacgaagtgttaactagagaaaacaaggtacttaatcttgaaaagagaaaaaggattaaagaaatacaaatagagaaggtggacaatgctattgatactctttctgataatgaaaggagaattatagaacttaggtatttttataggcttcaatttaagcaaatatcagagagacttaatctaaatgaaacttattgtatgcaattaaaatcaaaaacactatataaactagagacacttgtgtttatataagagaagcaccataaaatattgaaagtattttatggtgactaatcctatataagggataaagagtaatagagttaatacaataaatatggttggtaatatatattaatacataaatggacataaagggatggaaaagttaaattttctttcatagtgttttttattgttattttaggatgttttattagtgttttgcagatagcaccactgaaactatatacctaaaaaggaattactcaaataatttaaaggtgaactataaattgaatgagacatctggatcaacttgtatagacaacgttaacaatttaactaataatggcacgtacaatggaaccacaagtggagcagatagtaatggcagttacagaaatttcaatggaagtagtgattaagttagttttaataactcaataatacctaaaggtgctaaaactattaaattcaaggtcaaaatagctagtgtaccaagtcaccaaatggctattcttgataatgcagcagatgataataatacgagtggaataactacaagtggaactgtacaattagattatttaaatggctaaagttgaaaaattcattatgtatgagttctaaaaaaaagtgtatgtgataattcttggcatactgttatgttaacatgggatgatactaaaaattcaaatgcaaatgcattcaaatggtatattgatgatttggttatcctgatagttgtggtgcagcaaaatatcttgaagcttcaaatgcaagctattcattaaatattggaaaatcaaatactactgattctagatataaatattattttcaaggagcactaagagatatagaaatgtatgacactgtagttgagtacaataacataagtacgggaataactttaaataaaactacagatgaacttgtagtgggtgacacagatactcttatagctgcagtgacaccagatgatattgcaagtaaaggggtaacttggagttcaagtgattcatccgtagcgagcgtagataaaacaacaggaaaggtaacagcggtaagtgcaggaacagtaactataactgcaacaaccattgatggtaaaactcaggcatgtacaattaatgtaaaagctcaaatagatacaacagcagtattaactttaaaaatggtagatggaagtttagaaaaatattatttgtctaaatcaggtgtagatgattttgtaacatggtataaaaacagatccaatggaaccggaaatgcatattatgtatttactgctaagccaacgcctccatacacgtatgaaacacatactgtagcttttgataagatagtttcatatgaaattcaagaataaataaaaatattatatattttatttattaatagatgaagccttacgaggcttcttttttatttgcatataacatttgtattcaatattacaggataaacatataagttttaactaacatcgctataaggttatatatgttaatataagatcatagaaaataattaatatttcttaagggatttaaaacattaagatactcaccatattttgaggtgagcacatatgtatttaaatccctaattttattcaaaatttgaggaggatttaaaatgataagtgatttagaaagtttgggaattgattttaaagatgagggggaaaattatgtacctaaaaaagattattcaggaaatttagtagctaagtatgtttttgattcaaatggtatatcaactgataatattacacttaaagatttaagtggacatggttatgatggtactatgtcaggtgttagtataaaagatgactctgaattgggtaaatgtgcatattttaatggtagtgctagtgttaattttaacaatcaaattataccaaaaggtaacaaaacaataattataacctttaaaaaagattctggaactcaaagtaatggacagtatgagtttcttatagaacaaggaagtggacaaggtgaatcaattacttcatggtctataaggtttgattcatataagactgcttgtttaaacaatttatatttttgtaatgatgatagtaagattaatatgttaaattctcatccagctgtttttaacgtttgtgatggtaaaaagcatactgcgatatttaattattatgataacaaaaccaataacacttattgtgacagtttaaaagctcatgtatgttcttttgattttaatggtggggagtatcgcactgcagataatagtataattggccaaaagtatgttgggtatataaaatcaattgaaatatacgatgacgtagttgaattcaatagtattagtacaggtacatctttaaataaaaatatagatcaattaataataggacaaacagataatttagtagcaacaattatgccagaggatgttactgataaatcagtaatatggtcatcaagtgatccatctatagtagcagtagacgaaaatggaaaaataacagctttaaaggtaggagaagtgagtataacagtaacaacaaatgatggtagtaatttaagtcaaacttgtatggttgctgttattgatacaaccattccagataaggcttgcttaaatatatctatgactaatggtcaagttaagcagtattacgtaggtatggatttagtaaataaattcatatcttggtataagcttaggtcagcaggaagtgaggaaccattttatgaattcgatataactcaattgtcagaaccaggtattttaagacatgactatgtagttttcaataaaatatcatcctttacggtagatgattatgttaaataattgagtttatattaaattaagtaattaaaaaagttttaaggtgaatttattttgatatacttccaagaatgggtttatatcaaaataaaatataaagttaaatgaaaggaggtgtaaaatgagtgaggattatgatgcgaagttatgccaggaatggcacaaggttattgacgaaaaacttaatttgcataatgtaagattgaatgaccacagtgatagaattaaaaaattggagagaaggtctgcggctgtagacgaaagggttgaaaacctttgtgaacagctgaaaaatttagtaaatactcttaaatggggttttggtatattagttaccattaccctttttgttttgggatatttaatgaaaataaaaaattagaaagggaatgatagaatgaaaggaatcgatatttattcaggacaaggaagcgtagattttaatgcagttaaagaaagtggggtagaagttgtttatataaaagcaacagagggattaacatatacggattcaacttacaaggatttttatgatggagcaaaaaatgcaggacttaaaattggtttttatcattatttaagagcaaatgacccaacaagtgaggcagaacatttttttaatacaatttcaggactttcattagattgtaaatgtgctatagatgttgaagtaacattaggtcaaagtatcgaccaaataagttcaaatgttagaaaatttgcggattatttgataaataaaggattggatgtttgtgtatatacctatactaacttctataaagataatttaaatagtacggttaaagatttgcctttatggatagctgaatatggcgtaagtaagcctaatatagatgcttcatatgttggatttcaatattcagatagcggttctgtgaatggtataagtggttctgctgatttagatgaattttcagaggggatacttgttggaggtacagttgttatagatccaggacagggtggagatgataatataaaggctattcaacaggatcttaatatcttactaaaaagagggctagaagttgatggaatagaaggaccagagactgaggctgctataaaagattttcaatccattatgggacttacagtagatggaatttggggaacaaatacttcaggggctgcacagcaaattttttcaagacctctagatggagttgcatatcctcattatgaatatgcaacaagatatattcaatatagagttggagcaagtgtagatggtacctttggtagcggaacaaaagcaaaagttgcagcttggcagtcaaatcagggacttatggctgatggtgttgttggatcggctacttggtcaaagctattagatgaaaattaataaaatataaatgaaaattgtccacaatggctatgtggaaagtaagatgtttttaacacatagccatttttcttttttattacatatatataaaataatgttgactttgtggtaaaattgtaataaaattacactaaaatggtatagaatggaggtgagaaggatggaattagtttgctgtattgcggttacaactcttgtaatgttatttttaaattcaactattataaggaaaagagcaatttggtattttatttccttagcagcttcctttgccacagtattttttgaaattttcaaaattttgtataaagttcatattgggggagttttagctgtatttgaaaaagtgtgtataaaaggatttatagccatatcattatttctacttgttatgtttgcaggagcacttaataataagttggcagtaactaaaaaacttgttgcaataagggcacaaatggctattatggcatctatatttatttttccacatgtatgtatttatttatactatgtactaaaatatacttttccagaggtaatagataagggcagtatagaattattcacagcagcatatatcttagcgggaattatagcattcattataatgatgcctttgtttattacatcactaaagaaagtaagaagaaaaatgaatggtgttaagtggaaaaagcttcaaagatgggcatatcttttttatttattagtatatggacatatattatttgtaatgcttaactcccaaaaaattgacataacaagatttgcaacatataatatcttattcggcatatatttcatacttagagtaacaaagacaagactaagcagtgtaacaaagagtgtagagccaattgcttagatattgtaagttcagctgatagtttggctgaactttttgttttatttaaaatataataatataataactttatttttacattttatgatataattcttacatacaagtgtaagggagagatgaaaatggtaaagtgcaacaatctttatgggaataaaaatgtggaaatagtggaaagtagaggagatataaaagtccttgaatataagaaagatttgagtgtagatatttctagcgctgctgctttatattttgcttctgaaatgaatattagaaagagacaagtattgattgaattaaaagataatgcatacacaattagtgcaggagctatgcagtggatgtcgggttccgttactatggcagctgatgttaaaggtattggtgatttgtttggaaaggccttatcgtccaaagtaacaaaagaatcagcaattaaacctaaatatcaaggaaatggattattaatgttggaacctacatataaacacattttacttgaagaagtttcagattggggagagggaatagtactagaggatggactttttctagcttgtgaatcaaatcttaaacagaaagtagtagcaagaactaatttttcttcagcagtaatgggtaaagaaggactatttaatttgtgtcttaaaggtaaaggagttgcagttcttgaaagccctgtgccaagagatgaacttatagaatttgtgcttgaaaaagatgaagtcagaattgatggtaactacgctatagcatggtctgatacactagattttagagtcgaaaaatcaagtaaaagcttaattggttctgctgtttcaggagagggattagtgaatgtatatagaggaacaggaagaattcttatggcacctgtaagataaataattttgtataagaaaatccagtgagcatagctttcactggatttttatatttatgtccaaggtatttataatttagtaggtacatataataaaaaatgtattatgtttaagtattggaggagctatgagaaaaaagattagtgttttgtttttactttgcatttcagtaatgattttttttataaaattaagaagtgcacctatatttgactgttaccatgtaatgctaagtaatgaagctataagagttaggtactacaaaattaatatgattcttgaaataatatacacttttatgggaatactaattcctttgcttattattttctcaagaatacatgtaagccttgaagagtttgcttataaagttaaaaaagtgtggctcccagggatttgtatatattcttttttatttgttatagtgtaccatatcttttatcttccacttgatatttactcaggatttataaatgagcatattttttcagtttcaaatcaaagttttggaaaatgggtgtggaattggtctcttaatgtgctaacatcagctgtttttttggcagttattttgtggattccatataaaatagctaagagatcagctaaaagatggtggatatatacttggattatttttattcctgttattatattttcatacataatttctcctatagtaatagatccaatgtataataaatttgaaccattaaaggataaaaggcttgaaagtaaaatacaaaatcttgcacacagggcaggagtatataattgtcaactatatcaggttaataaaagcgcagatacaaaacaaataaatgcctatatgacgggggttggaaatacaaaaagaattgttatatgggatacggctataaaaaatttatctgaggatgaacttgaatttgttgttgcacatgaaattggacactatgttttaaatcatacaataataaattgttttggaacaataggtggattatttataatgctttatattatacataaggcggttccgcatactgtaaaaaaatacggcaagatgcttaaaatagagagcattataaatataaggtcttttcctcttgttatactagttataactatttgcacttgtgtttctgagccgctttataatgctgtgagtagaactatggagtacaatgctgatacctttgcagttgagctcactcacaacaatgaagctggagtaaatatgtttaaaaaattatcagttaaaaatttatctgtaatgaaaccggatagatggtatgaaatatggaaatacacacatccatctttgcaggaaagaatagattttgttaagtcgtataaaccctgggaacaaaataagcctttaaagtatggtagatacattaaaaataattaagcgggttaaattccgtttggttatttttttatatttcaaaatgttataaagtatagaacaatatattgaaaggataaaaaatatatggtattatataattgagaacgataatcaatatcgattatgcttttttatttggagtaacctttgatagagggaggagataagtgtgaataatattttttatataattacattaggattagttgagattgtaatatcttccttacttacattaaaactatccttaagaagtggaagtaattcaaatataacattaataagtacatctaattttaaagcttttatatttattttttcttcactttatttaataaccattatttcttatataaaataggtggttaaatcctaaaggtttaaccacctatttttctattatttgcatggacaaactaataaaaatttaaatatatcatatgtcaaaaaaaaaatcaatatccaattaaaattaaatttgttcattttcataatttatgttataataaatacagaagagaagatctatttattaaatttaactatatacgagacgacaaataagtatcaccttttattaggtgattttgatttttgttaggtatatagaaaaaaaggagcgttcacattgagagtaaataatagaagaaagaatactatctccataaaaatgtttataaaagagtttggtgagcatttttcggaaaacgtcataaaaagacttatggatttagatttgagatgtgtacttacaagatcgaaggaagattacaatatattagacttaaagcatgtagaacatattagatatgacaatgaaaacaagcttggcaatgaacttaaagagtattgttatgctgagtttgttgttatagatggagagctttatttttcagacaaatgtatggaaaacgaaagagtaatgcaatcgtcagttgtagaaaagatatataattatcttagtgatgataatataatttgtgaaaatgagaaaaatttcaagaaagtagaagaagataatatagattatattgttgacaacatactgcttaaatgtcctcaggtttctcaaaaatatattgatattgtaaatgaaatgctttctttagctgaaagaaaataaagtatcaagatggtttctataaggtacaccttgtagaaaccatctttttgacattattgtatagcaggtatacaatattaatatgaaaaattcaaattatgaaaaacaaataagtgagctaatattagaaactatatgtaaatttgatgagagggattctaaggaaagaaattttggtactgatgtaaatatacatcattctgaaattcatatgattaagtttataaaggaaaatacagatttgcatatttcagctattgctagaaaactaggaattacaagaggggcagtttctcaaaccataaagaggcttcagagtaaaggtcttataacaaaggaggtagacgaaggtaacaattctaagattgtagtaaggttgacgggtaagggccagacggcatatattaatcacgaaaactaccataagcaatatgaaattagaattaaaaatattttagagaatatgggggctggaagtgaaaaagttgtatatgattttttgcttgaattttatagaaaaatatagagggagatttaagatttattttgaattagtgtatagtatgtatacaatggagatggagatgtttaaaatgactattaaagaatcttttgagcttaataagttcattatattcattatggcattaacgtgtacggttactgttgctaatttgtattattgtcagcctcttttaggacaaatagctaaaagctttaatgttacagaggctaatgctggatttgttgttacgttaactcaagtaggatatgctcttggaatgctttttcttgtaccgcttggagatataaaagaaagaaaaaagcttataatagagatgcttttattggtttcagtattcctttttgctgcttttatttctagaaattattatgttttattagttacatcatttttaataggatttacaactatagtgccacagcttattgtaccgtttgcggcacatctatcaaaacccgaagaacgtggacaagtaataggtaatgttctgagcggactattaataggtatacttttatctagagtttttagtggaataataggtgatatcttaggttggagaaatgtatatttgatagcctcgttactaatggtttcttttttatttataattgtgttcttgtttcctaagagtaaacctacatctaagataagctataaaaaattaatattttctatgtggggattgataaaaagagaaaaagttcttagagaagcttctattaatggagcgcttatgtttggatcgtttagtatattttggactgcgcttgtatttttattggaatctaaagtatataatatgggatccaaagaagctggtttctttggattagttggtattgtgggtgctttggctgcacctgtagttgggaaagttgcagataaaaaaacaccaagatttgcagttggatttgctataatcttttctacaatagcttatgtttgtttttggggcatgggatataaaatatatggacttgtaattggagttattttgcttgatttaggaaatcaaaccggacaagtttcaaatcaagcaagagttcaagctataagtgatcaagagagaagtcgtataaatactgtatttatggtttcatattttattggaggttcaattggatcatttgttgcagctgtattttggcaaaagtttggatggagtggtgtgtgtgctattggtatgttttttcaaataattgcagttatatttcattattttatatacggaactaaatttagcattagaaataagtatggacaggtaaggtgatatataagtgtaaaattacaattttaaggttttagctatgaaaaagtagtctagaggcaggttgctttaaatataattttgtggtaaaatataactattaatataaagaatacctatttgtttggaaacaatgatgaatttctttaaattgggcacttgagaaattttgagttagtagtgcaaccgaccaacgattaattaagctgtattaattgttggttttttgcttgtgtaaggaggtgtttaaactattaaagtataaaaatgtaatttatgtattattgttcaatataatttacataatagggatataagatgtagagaggttaaataaaataatagtttataaatgccaagcatcatattttaatattaaaaagatataatgttaattcgtttttcaactatagtggctaaattgagaattatgaagataaatgtaggaaaatcaatttgattttcctacatttgttttttgaaaaggtaaatataaatattaacactattttgagtttaaaattagtaaaaatagatgataacatataattattacaaattaaaagtataaaacatagaaatattaactgtatttctacttgatacggcaaatatgataaaaaaataaataaattcatgtggtattgtggaaggctagtaaaaaataatgtttacatatatattgacaccaatgggtaaataatgtattataatttttgtaggatattttatacaaaacagtaataaaagataaaaaagttacgatttttgtataagatgtaactataagcgattgtaaaaattaaagggggaaaaaataatgttaaggagaaaattactgtctatgatagttgctgcttctcttgtagttggagtaggattctctaatatttgttatgcaaaaccaccagctccagatccaaacagcaatgtaggtacacatgatcttattagaaatagtacttttactgatggagttggattgccatggactgaggttgaaacagcacctgctcatggagattttgacatttcaggaggtacttataatataactgttacaaaaccaggaagtaatatctgggatgtacagtttagacatagaaatttacagcttaaagcaggacataaatatcatgtagaatttacagtaacagcagataaggattgtgatatttatcctcaaatagctatgtctaaagatccatatactcaatattggcactatggaaactgggaaaatgtacacttaacagcaggacaagctaaaactgtaactgatgatttcactatgacaacaaatgatgattctgctgaatttgcattccatatttccaatacaaacgataattcaaagcttccaataacatataaattcgataatatacatttaacagatccacaatatacacaaccagcaataccagatgataatatttacgatgcggtaagggtaaaccaagtcggatattatcctaatcttgagaagattgcaacagtaacttctgattcttcaactccaataccatggaaacttcaagacagcacaggagcagttgttgcatcaggacaaacaaaagtatttggacaagatcaggcatcaggagataatgttcatattatcgatttcacttcctacaataaatccggtaaggactataaattagtagttagtggtgatactgatgaaaatccagcatacagtgttccttttaatattggaagtgacttatattcacaacttaaacaagattctataaaatacttctatcacaacagaagtggtatagaaataaaaatgccttattgtggtgattcatcattggcacgtccagcaggacatccaagtgatataatgggattggcacctaataactggtatagcagcttagctaattacaagttggatgtaacaggtggatggtatgatgcaggagatcatggtaaatacgttgtaaacggtggtatatcagtatggactatgatgaatcaatatgagcgtgcattatacaacggaggagatgttacaaaggctcctttcgcagataatactatgaatattcctgaaagtggtaacggaacaccagacatacttgatgaagcacgttatgaacttgaaatgcttcttaagatgcaagttccagcaggcaacacatatgctggtatggcacatcataaaggacatgatgaaacttggacaggtcttggagttcgtccagatcaagacacaaaaacacgttatttacaaccaccaagcactgcagcaactttaaatcttgcagcagtagcagcacagggttcacgtttatggaaggataaagatgcagatttctcaactaaatgcttaacatcagcagaaactgcttggaaggcagctcttgcacatcctgacatttatgcagatgctggagatgtaggtggaggagcttatagtgataatcatgtaactgatgaattctattgggcagccgctgaactttatgcaacaacaggaaaacaggaatacttagactatatacaaaagtccccatactatttacaaatgcctactgagttaacaggaggagaatctactggaaacgcaggaccatttgattggggtaatgtacaaggtctaggaacaataactttagcaactgtaccaaacaatctatcaaaaacagatgtagatacagctaaaagcaatatagagaaagctgcagatgcatttattgatcatcaatctaaagaaggatatggtacatcacttgcagagtcacaagttgatacaacttaccatggagtaaagggtccaatagttaatggatatccttggggttcaaactcatttgttgctaatgaagcaattgtaatgggatacgcttatgactttagtaaaaatgctaaatacatgaatggtatggaagaagatatggattatttacttggacgtaaccctaatgttaagagttatgttacgggatatggagcaggagcagttaaaaatccacatcatcgtttctgggcacatcaagctgatccaaacttccctaatgcaccagcaggatgctttgtaggaggaccaaacagtgctcttcaagatccatgggttaagggttcaggatggcatgttggtgataaagcaccagaaaaatgctacatggataatatagaatcatggtcaacaaatgaaatcacaattaactggaatgcccctatggcatggatttcatcatacttagatgacaatgcaccaaaggttaacaatgtaaaatatggtgatattaatgatgatggagttgtaaatggacgtgatatcatggtattaacacaatatattgcaggtaaacctgtaactatagacacagcagctgctgatgtaaatggtgatggaactgtaaatggaagagatcttatgattttaagacaatatgtatcaggaaaggtaacttcttttccagtagaaagtaataaataatgcttattttagaataaattatttgatttctgcttcagagctgtaaaagctttgaagcagtttttttatagctatatataattgtaggcggctttaggccgcctacaattatatagctatgtgaatgtgtttttgaacagttatcaatatatttattccataacagaaaaaaagcattacaaagattaaaacaaaacttattacatcatattttaaaggaatattgtttttggatgcaagatgattgcaaaataaaatttctccgcctaataatataagtacaaaaggccataggtgtacaacaatataataaaatgggaagttgaaaaaattaacacaaaaataaagtattccgaaaataatcagtaaaaaaccaaaggtcaaggttcctactcttctttgatgcattctttatcacctatctttgcttttttactttttattattatgaatatgccaacaattataaataaaatagaaattaatacactttttgaatatcttaatatttggtaatcaatataagtgtctagtaaaggtataattacattatccataagagataaaaatccaagtaaaacaaatatatatgctacatactttgctgaattattactctttaaagctttattaagatttgttgatttaaatataggcaaatctgtatcttctagagtctcatttctagatgccttatttctaacgtcgaatatactgtaaaaccatattattggaattagtatagaaaaaactccaagatggaaggtagttgagactgaaatagtgaaaaagaataaaaacataagttctataccttgacgcataagacctagatacatatgtccggctccaggaaccaatgagaaaaaagttgcagttgattttgaatgattcaatttattaatcctccttaaaagttttaccttgatttaataatatcattatatagtattgagcttaagattaggtttatagaaatcttaaaattttcttaagtttaattattataaaagaagatgcatagtaaaaaaaatagttattctatataatgatatgtagtaattaaaattttataaaaaaggggcagatttatggaaagtagaactgttttagttgttgatgatgaaaaggagataagagatcttataggtatatatttaaataatgagggttttaatgttataaaggcagaaaatggagtggaggcattggagatattaaaggacacagaagttcaattagttttactagatattatgatgcctaaaatggatggaattacaacctgtatgaaaataagagaagataaaaatacaccaattataatgctttcagcaaagggggaggatatggataagatattaggattaacaacgggagcagacgattatatatcaaagccttttaatcctcttgagcttatagctagagtaaaatcacaaattagaagatatactaagttgaatagtacctatgaaagtaatagtgcaaacattgaagtaggtgaaattactataaatacagacacacatgaagtgaaaattggggataggacagtaagtctaactaaaagagaatttgatatattagtattgctctcgagaaataagggagtagtctttagcacagagaagatatatgagagtgtttggcatgaagaattttatgattgtcataacacagtgatggtccatataagaaaaataagagaaaaaattgagaaaaatcctaggaagcctgagtatataaaaaccgtttggggagttggttataaaattgaaaaaaatatttaagccatttttgaaactgtacagtttttctaaaaaaaaggtagtaaaaagtataaggcttgaactggtggttacatttggcatatgccttttagcggcatttatacttggaagttggtatacaggatattataacgataaacatatgatggcggaagttgattatagctctggaatacaaaggatttcttctgatatggaagacttgaagggtatgttagatggtaaaaattcaagcgatgagataaataaaatgatagatagtggagcaaaggatgatataaaggtttatttaacagatacagaaggaaaggttttatttaagtcaagcaatgcaaaagagaaaaaaatagatatacatgatttaatagtgaagtctgaaaaatttaaaagagaatatgacaaagcaaccgtaattaatacagttaatggtattattaaaaaaacaatatctcttgaaagtgttgaacagtacaatgaaattgatggaataaaaattgataataaaaatgcttatattatagttagtggaattccaaaacaaaagattacatacataagaccaggatatagcccttttttatctggaattatagctgttataacttttgtttttattttctacttcttaactaataggaagatggagtatatagaaagcgtatcaaacgggcttgtggagatttcaaagggaaatttggattataggataatgctaatgggagaagatgaattaaagaatttagcggataatattaattctatggcaagtgagcttcaaaaaagaattgaaaaagaaagagaagctgaaaaaactaaaaatgatcttataacaaatgtatctcatgacttaagaactcctttaacctcagtaaaaggatatttgcttcttttaaaggataaaaaatatagggattctaatgaatttcaagattttatagaaattgcttacaataaatcagaaaaattagaaaatcttataaatgatttatttgagtatacaaaattaagtaatagagttatagaactaaataaagtaagcatatgcctagatgagcttttggagcaattagtagaggagctatatgtaatatgcaaagaaaataatacagagattgaaaaggaaataactgaaaagaatatttttgtaaaagtagatggagataagatggtcagggtgtttgaaaacttacttatgaatgctataagatatagtaaaaaacctgggaagataaaattaaaggttgaagatcaaaaagcttatgttatagtgactgtggaaaatgaatgtgaacatataaataatcaagagcttaaaaaaatctttaatagattctataggagggataaatcacgatctgaagccacagggggaagtggtttgggtcttgcaatagcaaagagcatagttgagttacataacggtgaaatatgggctgaaagcagagaggaaacaataagtttatttgttaaattattcaagtgagatttgtaagttctatgtataaatgtgataaaatatacaatgaagtatgaatttatggggtgatagagtgggttatagtaaatataaatatgaaggtctattgaatttatgcctagaggtttttcaaaggcttggctatacaaaagaggacagctatacaataggggaagtgctgcttctagcggatttgtttgggatagaatctcatggagtgcaaagacttacattgtattataagggaataagaaatggaagcataaaggttaaaaatcatatgaatatagtaaaagaatcacctgtgtctgtagttattgatggagatgggggaatgggacaaataatatcaaagaaagctatggagagggctattgataaggcaaaaaagacagggataggtatggctattgttaaaaattccaatcattttggtatagcgggatattacagtaggatggctgagagaaaagggcttatgggaatagctatgacaaatactagagccattgtgttgcctacatatggaagagagcaaatgcttgggactaaccctatttctattgcaatgcctgcaagaccaataccgtttttacttgacatggcaacaagcgttatcacaagaggaaaggttgaggtttacagtaaaaataatcagaaacttaattatggatgggctatggatgatgagggaagaaaaacagataatccagataaagttttgaaattagcaaatggaaatacaggtggacttttgccgcttggaggagatacagagatttttggtggacataaaggatacggaatctcttttgctgttgaaatgtttacgtctatcctgtcaggtggacttaccagcgacgaaatacgtggtaataataatactaatggtgtgtgccatgcttttgctgctatagattatggtttatttgatgataaaaatgctatagagaaaagaatgtcagcctatatgcaaaagattagaaattcaaaaaaggcatatggtgcttcaaggatatacacacacggagaaaaagaacttgaggcttatgaggatagaatggagaatggaatacctataaatgagaatactatagttgaaattaaagaaatatgtgattatgtggatattgatatcaataactacttgaaaaaatattaaaattcatttaaacttggtatatatgataatgattatcattaaaagaaagatattatgaagcttgcttttataaatatagcagtttaaagatggaggttttagaaatgagtgaactagctagaagattaaatcagtgtaaaaaacctgttggagatcaagggaaagttgtagttgatgatatgaatgaaagacattacgagcttacaggttggggactagataaaattaaaattgataaagcttataaaatgttggacatcggatgcggtggaggaagaactgtaaatagattaagtaaggcagcagaagaaggagaggtttatggaatagactattcttccgattgtgttagatgggcaagtgagtacaataaagagttaattaaagagggaagagttcatattagtgaagcaagtgttgaaaaattgccttttgaggataataagtttgatgttgtaactgctgttgagactatatatttttggccaaatgtagaagaaaatataaaagaagtcaatagagttttaaaaaaaggtggtaaattcattataataaacgaaatatatgatgatgataaatttagagaaagaaataatgaatttgctaaaaatagtaatatgaaaatatattctcctgaaaaattaaaaagtcttcttaaaaatgcaggatacttaaacgttgaaatggaaattaaggaagaaaataattggatatgctatgttagcgaaaaataataagagcgagagattttatatagtctctcgctttgttttaatataaatatccttctttgtataataattcagcagttaaaacagctcctccggctgcacctcttaaagcgttatgagaaagacctacaaatttatagtcaaagagagtatcttctctaagtcttccaatgcttatgcccatacctttttcgatatttctatcaagctttggctgtggtctgaattcatcctcaaagtaggttataaattgttcaggggcagttgggagattaagcaattgaggtttacccttataattttttaatttttcgactatttgttcttttgtaggcttattttcaaaagaaacaaaggttgctgctaggtgtccgtctgaaactgcaactctaatacattgtgaagttattaaaggatcttttttcgaaactattttatttccttctatatgtccccaaacctttaaaggttcatcttcgcttttttgttcttctccaggaatataagggattgtattatctactatttcaggaaattgttcaaaggtttttccgcttccagagatagcttgataagtacagactaatatttttgttggtttaaattccaaaagtgcgcttattgcaggaacgtagctttgaattgaacaatttggttttgcaactataaagcccttttttgttcccaatctttccttttgctttggaattatatcaagatgttcaggattaatttctggaattattactggaacgtcttctgtaaatctgtgtgcagaattgttagataccactggtatttcgtgttttgcataattctcttctatttttttaatttcgctcttgtccatatttacagcacaaaagacaaaatcaacttcctttgaaatttcatcgatatcataaatatcttttacaataaaatcttttatatattctggcataggtatgtcaagcttccatcttccttttacagcatcagaatacttttgacctgcagaacgtggacttgctgcaatgcatgttacttcaaaatatggatgattatctagtaaggtagcaaatctttgtcccacaagacctgtaccaccaagtaaaccaacccttagttttttattcatttataatccctccgttaaaattatgggtatctgagtatattgcaatgtaaacggttaataattatgcaatgttttatgctattatacaactttgagtgagcattgtaaattgtatttaatcaatattagtgataatataataaaagcgatatgttttttataatgtgttaaatagattataagcattaagagaggtagcacgcttatggtaagttatgttgtaaagaaagctctgaataataatgtggttattgctgtaaaagacaagtatgaatttataatagtaggaaaaggaattggtttcaatgcaaagaaaggaagccgtattcctgagaacaaaattgaaaacgtctttataaagcaatcattaggggaaagtaaattcgatatagtgttaaaaaagatagatagtaaaatagtaggaatttgtgaagagataatattcttatgtgaaaatgaattagggataaagctaaatgaagcaattcatacatcattacctgatcacattgattttgcatttactagaataaaaaagggcataaaaatagaaaacccatttttgaatgaaattgttgcattatacccaaaggaatataagcttgcagagaaggcattagatatgataaataaaaacttcactacaaagctgcctaaagatgaaattggattcatatccatgcatattaatgcagcaatagagagaaaagatgtgaacgacactgttgagtatatgagaaaaataggtaaggttatggagttcatttcatctgctttaaataaggatatagataagagttctctagcttatgaaaggactgtaactcatataaattttgtgttagatagaattaaaaataagaaaactataaaaaatcttttacttgacagtataaaaaaacaattatataatgaatacgatttagcaattaaggttgctataaaactagaaaatttattttctgtatcagttcctgaagatgaaataggatatatcgctatgcatcttaagagattaaaggaactttaggcagtgttactattaaattaggcacgagctttttaaaagaattttacttaggaaattcttttaatgggctcgtgttatatttttttgtaggtatatgcgcttaaaaatgatacaaaataaattttaaagataaaattaggaggaatactttatgggtaataagatatttgccgtacttcaaaaaatcggtaaatctttaatgcttccagtatctgttctaccggcggctggaattctattgagacttggacagccagatttgcttaatatgccttatgttcaagcagcaggaaatgctatttttaataatttacctttaatttttgcggttggagttgctataggtttttcaggcggagaaggtgttgcagcacttgcagctgtaattggagaactaatacttgaggcggttgaaaaaacagcaggtgatacggcagcagcagctttagcaaaaacagcggcagcttcacatcatatgacgcttgcagcatttcaaaaaactcaagaatacagtaacattgtaactaaaacaactattagtatgggtgtttttggcggtataataatcggtcttacagcagctattttatataataagttccatgatataaagatgcctcaagttttgggtttctttggtggaaaacgtttcgttccaattataacttcaatttcagctcttattattgcaactataggagtaaatatttggttgccaatacaagctggaataaattcactagcagcatttgcaactacatcaccaattggacctgcaatgtatgctggaggaaaaagacttttaattccactaggacttcatcacatttattatccattgttcttatatcaatttggtcactttgtttcaaatggagttacttatgtaggagatacagcaagatacttccatggggatcctactgccggaaacttcatggcagcagagtatccaatactaatgtttggtcttccaggagctgctctagctatgattgcagctgctaaaaaagaaaagagaaaagaaatggctggaatgatgatttcagcagcatttgtagcatttgtaacaggtattacagagccaattgaattctcattcatatttgttgctccagtattatttgtgttccacgtacttgctgcattcgcatctggtcttattacaagttatttacacataagattagggtatactttctcagcatccttcatagattatgttttaggattcaaatatgcaggtcatccattacttatatggcttgtaggtatagggttctttgtattgtactttgttgtattctacttcacaattaaagcaatgaacattaagacaccaggtagagaagatgatgatgcagaaggtgttaagaagataaatgtaaaaggaaaagctaaggcagctaaggtgcttgaagctataggcggaaaagataatataaaagtacttgatgcatgtataacaagattaagacttaacttaaatgatccttctttggttgataaagctacacttaaagctcttggagcagctggagtaatgacagcagaagatagtgttcaagtagtttttggaactgaagctgaaagaataaaagatgacataaaagcaattatacaaaatggtggatatgttgaagatgattcagataaggaagaagaagttcaagaggataagcaaatttctaaaggtgcacacgaacttttaagtccagctgatggagaagtagttggtattgagagtgttccggatagtacatttgctgaaaaaatgcttggagacggttttgcagtaataccttcaggaaatgaagtacactcaccagctgatggagaagtatcagttttattcccaactaagcatgcatttgcaataacaacagaaggcggacttgaacttttaatacatgttggaattgatactgtagcattaaatggtgaaggtttcacagcacatgtaaaacaaggagataaagttaaaaaaggagatttgattttaactttagatactgagtttataaagagcaaaggtaaaaaccttataactccagtgattgtaactaacatggatgttgtaggaaatatagatgttaaattaggaaacgttaaaaattccgagaaagctgcggatgttaccgtaaaataatttactaagttaaaataaatacccctgaaataagtttggggtatttattttaacttagtatcttgtattaaacagtactaaatgttatactatagttgtggaaagaatatataaaagaataataatataataggagattcattttttaaaaaattggttttcctatagttaggagtaaaatgtcatgaatactcagctaaaaaaaggaattttggaattgtgtgttctttcgatattagatagaaaagattgttatggatatgaacttgtagatgaaatttctaaaagtatagaaatttcggaaggaactatatatcctcttttaagaaggcttagcaaggagggcttttttacaacttacttgcaggagtctacggaaggaccacctagaaagtattacaagttaactgagcttggaagagaagaaaaacaaaagctggtagaagaatggatggaatttgttgaaggtgtaaatagtatattgaagggggcacagcagcatgagtaaaaaagaatttctcgatttgcttaaatcatatcttgaaggatttgggcaagaagagaaaaaggatatattatacgattatgaagagcattttagaattgggcaagaaaatggaaaaagcgaagatgaaatagcaaaggaacttgggagccctattgatatagcaaatcagtatagagaagcaaatggcatggataaagtaaatgtgtacggaagccaaaagtcagttggaggctctattgttacttttattggattgcttatgtttaatttcatatttgttttatggatttatataggcgtaatatcagctgtgattggagtttgtataggtgcttttgctgtaacagtatcaggtttagcgcttgtttttgcaagtgtatttggaggatggtttataccttatatacaaacacctgatatattgtcgcgagttgcagttttctttggaggtataggaactttggctttaggactcttaatgtgcatagcaatgttttatgtagttaaaattgcaatagttcttactgttaaatatattaaatggaatataaaagtgattaaaggttaggagtgataaagttgaaggttaatgtaaagaaaatagttttataccttgttggaatttgtttaattagttacggaatagcaatggcattatcttttagacatggtagtttattaaaaattgccgataaggattataaagtgaatgagagaaaagaaataaatacgaatggtatttcaaaaatatatgtggattcttcagcagctgatgtgtatgtttcaaggggatataaggttaatgtaactgctgaggctttaggaaacgtaagctccacatctagcaatatacctaaattggattgctataaagacggagatactttgtatataaactttaaaagaaaaggaccatccatacacatatttgattttacaaataaatcggatgttaaattaaatattactattccagaagcttataaaagtgatatggaggtggattcttcagcaggagatacaagtataaaggatttaaatttaaataaaatgtatgctaaatcaagtgcagggaaaatggaattagaaaatttaaatatatcagcagaattaactttaaaagatagtgctggagatataaacggtaaaagtattgtatgcaaaacatctacaatagatgcttcagcaggaagtataaaattagaagagtttagtggtgatattcaaggaaaaaattcagcaggaaatactgatataagttatagtaaatttaataataatatcgattttaaaagttcggcaggaaatataaaattaataattcctaaggattctaagtttaagttagatgcgtatgcaagtgcaggagacgtagattgcgatttccctttaagtagcagcggaggcggagtagaaaaagaagtaaagggaagtgtcggggaaagtaataatgttattaaattgaaaaattcagcaggaaatattgatattgacaattaaatacaagaaaataaaatggagttttaataaaactctattttatttatgtcaaagtgagttaacgttcacatgtaatagatttattttaatatatacagtattttgtatttaatactttaattatagcgattataagcgttttaccagtaagaatataattttacaatagagtaaaagtttaatataatctttaagtgttagggaaagttttgttgtatttaatgaaattagaagggggggttataatgtctaaaaaaagaccatcaaaattgattgcgttgtgcataattgcagctaccgcatctatgtctgtatttaatagtaatttcgtaaaagcagattctgtaatgggagatgtatatgtttcgaccaatagaagttttaataatgatggtactttaaatagtcctacaacttttgaggctgcattaactaaggttgctccaggtggagccatatatgttatggggggaacttacaattacaataatcagataacaattcaaagaggcaatgacggtcaagtggataaatttaaaaatatacagccatataacaatggtaaggtaatttcttcatctgaaacttgtggtaagccaagtaaagttagcaacgatagaggacttcaggttaatggagcttattggcatataaggggtatagaagtaaaaggtgctgtagctccggttactataaaggattgtgtggcatataacaacggcgcaacttctaatggcacatctacagcgtatagtgatggtaacggatttaaattaggcggagataaaatagcggtaagccatgttgttaaaaattgagtttccttcaataataaaaagcatggatttactttcaatagtaatgcgggttcaataagtttaactaattgtacaggttataacaatggatcaagtaaaaggagtaactttgcgtttaataacggtactgctattttaacaagctgcttgtcttacaaagcttctgccaatgataaaataagtgctgatgcaactgtaaaatcaaatgtattttagagtgcagataaaatgaaaggtacaacttaagtactttgcacagataaagattttttaaagcttagtcctacaagtgaatttattggagcaggtgtatggtggaataaaggtaacaatatcaaatagtattttggaaaatcgtttaaaggaaaatttaatttggcataaagataaattttatgtaacctactcaaataattattttactaaaataaataagagaagtccaaggttatgataggtaaatgctttcaacaatgtgtatgaggcaataagggcaaatggaataatggggtttttggtttaagggcctaaataaagagaatttaagtgcagaaggttttaatggatagagtacagttgtatcaggctaagggaaataaattatatatatttataaaagggtgagttatgggctttatataaataaattcggtacagaaagctaggaatagggtgcctagaattctgtaaatagaatttatatataatgtatattaatacattatatatactgctgtaaaatgcctttaggcttatagcaaacattttaaggttagcaaaattataattgagatgagagattatagggtaagtatatcggatacttggaaacaatacttttctaaattttccccaaaaatattagaaaactaaaagcatactacatgtgatttttatgtagtatgcttttgttttaaagatttcctataagttagaagagaagttaagagtaaaaggtgtgtaatattgctaccgctattatatataaaatattttaattaggaattagttcccagagttgtccgttaccaccccaataattccactgacaaacattggcaccagaatctttactcatgttatagacgtctaggcaagatttgaagtttgaggacttagtcaaaatagcatatttattttcggagactttttgaattttaaatttttgcatatcaccattccaatagctccattcctcgatattagatccattagaggatgaattatttgtaacatcaatacagcttttgtaattagaagcacctgttaatatgtgataacatccatcactgtcagatactattttgaatttttgcgcattattgtttaaaggagtccattgtcttatattagttccatcagtgttttgaccattggcaacatccaagtacattccgcttaaagagctttttatgtagtaagtgccatctagcttaggtgaaggatttattgtcgagccagaaatttttgaaccccaaatagattcgttatttgaacctattaacgaaaaggtcatagtatttttgtgagaagctgattcgtcatattgtttgaagaatatacccttgtaggtaataccgccaattaccatgttgcaatagtaactgcctgacttttctacccaagttccggtgtaatctccagaaatactgccattagcgtttaatgaaactttagatgtttttaacattccggtttttgctgtagttgcatttaatccgtgattaataaattcataagttccaataatgtcattgcttgaatagccagacttagaaatttgacttcctaaatattcgtatactgctgttactggccagccatcttcatttaaaaattgttgatgcactctaatttgatgtgcttcagttccgttattaaatcttgtatgataaataaggtatctttgtccagaggtatctataattgctgaattatgtcctcctgacatgtatcctttagagcttaattctgaaccattcacacttgaaagagaagaaaaatagtagtttccaaatagctttatgcctttatttgatttattatcattagcacttgtacatattgcaggatttccttttgcatctgtgtaaggaccagttatgtttttggatctaaataaacgaatatggtatccgctaaaattatctgtagcatcaagtccgcagtaggattcgtataagtaatagtagtctgttgctttatcatacacaatatatgaaccttcaccacaggttccatagcctcctgatatttttataccaaggtattgatcagaggcgttggttttggtggaataagtgtatgagtaatctcttaaacctgttgacttatctaattttaacataaaaataccaccaaaccatgaaccgtaggaaagccatagattgcctgatttatcatactttacacaaggatcaattgcgttaggtccataagatgaattccaagctccttttgataagtatctactggcaacattgtttgttcctgtaacctttgaataatctgtttggctagctaaagaagaattagtaaagcctgagtaaactattgttccagcgtatttgtatggcccagttatattattagatgttgctagagctatagaagaataaaatttgtcaccattaacactcatatatatacaccacttcttcatttgtggattatatataacatcaggtgcccatagatttccggtgatatcgtatgaattactgccatgagcagcccatttgccacctactgagaaaatatttgcataatcattgtttatatttgtttggaagtaattccaggaggctaaatcagaggaaactgcgtctgctctgtgtgatccaaaaagataatactttccgccagcttgtgctattgaaggatcatgtactgaaacccttgatgtatttaaggcggctgcgaaagcagtaacctcattgccaaaaggaattaggtttaattgagttacaaaagttaaggataatcctaaggtaatggatatgatttttttaaacttatttttcattgctattcgatataaaaatatatcgttccctcccttaaattattttatggaataagttcttttctagcctcctttataaattatttctaacattaaccataaataaggttaatgcatttggaaaattttttgtttactattttgcttgttatattaattcattgtatttgtaattttaaaatgaaaaagagtatatgtcaatgtttgcatcgataagtgaatttaattaatatttgtaaataggagaatagcacgcaataaatcaagggcaatattaaaaatatatatttactattattgatgcttatgtgtttttaaaattgactaggggatgaattatagaaaataagagtaatttattagtgcataataaaaatagtggaagctaaaatggcttccactatttttataacagagtatctaataatttttttatttcattaatgtctttattacttcgaacagcatagtcctcaagttgatcttttcctattttatttatattaaagtattttgctcgttcatttgcaaaatacaaaccgcatacacttgaagttggattcatcatataactttccgtcaattccactcctattgaagttttacctaaaagtaaatcaaataactttgctttttcagagtgatcgggaatagaaggatatccaatagctggttttatccctctgtaacttcctttaagaagtttttctaaggataagttttcatcttgagagtatccccagtattcttttcttacccttaggtgaagaagttctgaaaaggcctctgcaagtctatcgcatataagtttaagcatagtagctccataatcgtcgcattttttctttaatttatcggaatattcctttgcacctattccagcagttacaataaaaccacctatataatctttgatgccaataccctttggagcgatataatcagatagagctttataatcgctgtctttaagtatctgctgctgacgaagagtatttatggttacagttcctttatcagtgtagatttctatatcatcattaacagaattagctgggaatattccaaaaactccattacaagtgattaaattttctttttgcaataaatcaagcatttcattggcatccttaaagagtttttgagcttcagctccgtatttaggatctttcattattttggggtaattcattcccatatcccaagacgtaaagaagaaagtccaatctatatactttcttaattcatttataggtacagcttgtaatttttttataccgacaaatttaggttcagttattttagttttattccagtcaatagtaaatctgttttttcttgcgttttgaatggagataagttcaatcttattagtagagaaggtctctcttattttagaatactcttcatttaatttttctaagaaagtaaatttgttttcactcattagatttttggctacggtaacagcatctgaagcatcagtactgtgtactacatatttatatttcgtagctagttttaaagctgtgtgagtttttgaggtagcagcaccacccaccataagtggtatatcaaaattaagccttttcatttcttcagctacataagccatttcattaagagaaggtgtaattaaaccacttaaagcaatgatatctgcattttcacgttttgccgtttcaagtatggtttcagggggaaccattactcctaaatctataacttcaaaattgttgcaggaaagaactacagatacgatatttttgcctatgtcatgaacatcgcctttaacagttgcaaatacaaccttaccagcacttttattgtgatttttagacttttcttcgtttatatagggaagaagacattcaacagcctttttcataactctagcactttttactacttgaggaagaaacatttttccctctccaaaaagtttacccacttttttcattccattcattaaaggaacctctataatttcaagtgcatttgtatactcttttcttgcttcttctatatcttcttcaataaattcaacatttcctttaactaaagcataactcaacctttcacttgggcttttttgtcgccattcatcctcgtgcttttctaaggtttcagtcgtctttttatacgtttgagcaaattctagtaatgattcagaagcgttagatgatttatttagtacaacattctcaaccttttcgagaagatccttatctatatcgtcatataaatcaatcattgctggattaacaatacccatatccattccagcgtttattgcatggtaaaggaaaacagaatgcatagctcttcttattgcgtcattacccctaaaagaaaaggagaggttgctaactccaccgctgactttagcgtatggtagattctcttttatccatttaacagcttttatgtaattaactgcatagttgtcatgttcttcaattcctgtcgctatagatagtatatttggatcaaatattatattttcaggtggaaactcaactttttctgtgagaatagtataagctctcttgcagatttcaatttttctttcataagtagctgcttgaccttcttcgtcaaaggccattacaactacgccagcgccaaagttctttataaattttgcctcttcaatgaacttttcttctccaaccttaagacttatggaatttactatggctttaccttgaatagactttaatccaacttttaaaacttcaaaattagaggagtctatcataactggaacttttgatatttcaggttcacttgcaataagtcttaaaaatgtttccatttcagagcgagcatctaaaagtgcatcatcaaaatttatatctataatttgggcaccattttcaacctgatgtcttgcaatggttagagcctcctcataatttttttcacgtataagccttgcgaattttcttgagcccgctacatttgttctttcgcctatatttatgaagttactgttcttatcaatttttatgttttctagtccgctgtaaattgttttgggttccaagtttggaacttttcttggagaaatgcctttaactacgctgcttattgctcttatatgttctggtgtagtgccacagcagcctccaactatatttaaatgtccttcaagtgctaatttttttacaatgctagcagtttcctctggcagttcttcatattcaccaagggagtttggaagtcctgcgtttggatgaaaggatatatatctattttgtgtttcagagagtctttttataaaaggtataagttcttcagcaccaaaggaacaattaagccctatagcaattatattttcgttttttaaactttctgcaaaagcgtcaagagtttgaccggataatattcttccacttttatcagctattgtccctgaaattataataggaagttttatttttttattttcaaatactgtttctgctgcaaagattgctgctctagcgtttaaagtatcaaatatagtttcaattaaaagaaggtctacacctccatctattagagcctctatttgatgtttataggcattacatagctcatcaaaggttacatttctaaaaccaggattttcaacatctggagatagagaagcagttctatttgtaggcccaatagaaccagcagcaaatctaggcttattaggatttagttttgtgtagtaagtacaagcttcctttgcgagttttgcccccttaaaattaatatcatatattttatcttgcatattataatctttttgtgatatttcagtagcgttaaaagtgtttgtttctattatatctgcgccagcttcaaggtatctcttgtggatttcttttattatttctggcttggttaaatttaaaacatcattgtttcctttttgattggaatgacatgtacaagataaggaacctttaaagtcgccttcatctagattaaaggattgaatacatgttcccatagcaccatctaaaactaaaattttgttatttaacaaattctttagtgaagaattcataagttagcccccttaaaaaataggataaaataaaaagcccttggaaataacctcgggctttacattcgcgattattctcatctatcagcgtttgctgcaggatttagcaccacatatattaaaaaatatactggttgccgggtttcaaagggccagtccctccaccactcttgataagatttttacattaaatttgtttttattatattagttaaattaaaaaatgtcaatacagtaattttacaataataaatacatatatttattatagatatttcatttatccagttaagactttaggaaaattactttataaattggatgttataaaatgattggaggtgcattcatggattttaaggaaatcatagaaaatgatagaattagctcaagaaaaacaaagtttgaaggtacatttatagaatatcttgatatggttaagaaaaaccctgatatagttaagctggcccacaaaagaatatacgatattataaagagcaaaggctctgaggttttaaagcccgaggaaaatcatagaataagaaaaatttatggaaatgaatcaataaagagatataacttctttaaaaatgatttctttggtatagataaggttattatgaagctcatgaattattttaattcggcttctatgaaaggtgaagaagcaaggcaggtattgtaccttgtaggtcctgttggagcaggaaaatcatctttagttgaatctattaaaagagctcttgaggaggcaaaaccggtatattctttaaaaggctgccccatgagagaagagccacttcatcttattccaaagcatttaagaggggaatttgagcagcttcttggagtggagatagaaggggatctatgccctgtttgcagatatagacttatgcatgaatataatggagaatatgaaaagttccctgtaattactagtggattttccataagatctagaaaaggaattggtgtagtaccacctgttgatccaaataatcaggatacatcaattttaacaggaagcatagatatttcaaaaatggatctatatcctgaggatgatccaaggattttttccttaaatggagcttttaatgttggtaacagaggacttgtagaatttatagaggtatttaaaaatgatgtagaatatcttcatactataattacagcgacacaagagaaatcaataccatctcctggtaaaggagcaatgatatattttgatggacttataatagcccattccaatgaagcagaatggaataagtttaagtctgatcatactaatgaagcaattctagatagaatagtaaaaatagaggtgccatattgtttagaactaaatgaagagaaaaaaatatatgagaagatacttaaaaagagtaattttacagctcatatagcaccgcacacattaagtgttgcagctatgttcgcagtactttcaagacttaaaccgtcttcaaaggttgacctcataacaaaacttaaaatatataatggtgaagatattgtagagaatggaacaactaaaaaagttgatataagcgagcttagagaagaggcgggaataacagaaggaatgaatggaatatccacaagatttataattaaagctatagataatgctctttcaagctcacaatacgattgtataaatcctttgggtataatggaaaatattataagatcagtaaaagatcttgatatagcagatgatgaaaagaagaagtatttggggtttgttcaaaacataataagaaaagaatataataaagtcctagaaaaagaaataacaaaagcatttatacacagctatagagaacaagctgaaactttatttaacaattacttagataatgcagaggcttttgtgaataaaacaagacttaaggataaagcaacgggagaggagcttaatccagatgagaaatttatgagatctatagaagagcagataggtatatctgaaagttcagctaagggctttagaacagatgttacatcatatatgttctatgtagttagaaatggtgggaaaatagcatatgatgcttatgaacctttaaaagaagctattgaaaagaagcttacttcttcagtaaaagatttatcaagaataataacaaaatcaagagtaagagataaagagcaggatgaaaaatataatgctatggtcgaagaaatgaaaagaaatggctattgcgattattgctgtgatgttatattaaaatatgccgctaacaatttgtggaaggattgatagaatggcaatttttagagattacagtattaatcctacagaacatgatagaactataggggataggagaagacatagagaactggttgaaaaagctattaaggataatcttgctgatatagtatcagaagaaagtataattggagaaagtaaaagtaagaaaataaaaataccaatacgaggccttaaagaatataagttcctttatggaaataacagttcatctgtaggaagcggaactggaaacgaaaaaaaaggggatattataggaaaagagcaaatgggcaatggctctaaaggaaaaggtaaaggtgcaggaaacagcgagggagaagatatttatgaaacagaagtaactatcgaagaagttttttcgtatcttcttgaagacttaaatttgcctaatcttgataaaaagaaatattctgaaatagtaacagatagttcaaagaaaaaagcaggttatcaaaagtatggtataaggccaaggcttgctaaaaaaagaacagttatagaaaaaataaaaagagagcagtcaagaaaaagagcaataaaagaattaggtaaggatgataaggtagaaagattaccgttcagtgaagaagatttaagatatcatagaataaaagaaaagccaaaaaaagaatgtaatgcagcaataatgtgtgtaatggattgttctggttcaatggatagtacgaaaaaatatcttgcacgttctttctttttcatactctctaagtttataagaatgaaatatgttaatgtggaaatagcgtttatttcacactctacagttgggcgtgaagtaactgaaacagaattttttcacaaagtagaatcgggcgggacatatatttctagtggattaaatacggctatggatataataaaggaaagatttaatccagctacgtggaatatttacggattttacgtaagtgatggtgataatttcactgaggacgatgaaagagcaataaagtctatgagaaagttctgtgaaattgcaaatatgattggttatgctgaaattttaccttattcatattcaggaacgatgaaatacaagtttgataattatgtaaaggataaaaacttcatatcttcaaccataagaaataaggaagatttatggcctgttcttaaaaaaatgctcataaaggaattaaaggagtgatagatatgggggactacacgttaaaagagcttgaaacctggaatgagaaaattgaaggtatagtcaatgaaatggggcttaattattacaatcaggaatttgaaatcataagttataatggaatgcttgaagcggaggcttatactggaatgccatcaagatatccacattggagctatggaaaggcatatgaaaaacaaaaaacactttatggttatgaccttgttgggcttccatatgaaatggtaataaactcaaatccatgcatagcatatttgatgaaagaaaatactttactacttcaaattcttactatggcacatgtttatggtcacaatgatttctttaagaataataggctttttagagaaggtacagatgccagtgaaactgttaatatgtttaaaaatgatgctgatactataagaaattatatagacaatccagcaataggaaatgaaaaggtggaaaaaattctcgatgcagcacatgcaataagatatcaaactcacagagtaataggagagaaaagactatcttatgaagaaataagaaataaaataatacaagattataattcaagctataagcctagaagtataatagaaccttatgaaaagcctgtagagccagatttgagtaagatacctttagagccggaagatgacattatatattttatagagaactatggtaatcttcaagagtgggaaagaaatgtaatagaaattgtgagaagggaaactgcttattttattccacaaattgaaaccaaaataatgaatgaaggatgggcgagtttttggcattatacaatattaaatgagcttaagcttccagatggacttcatttagagttcttaaaaaggcataatgatgtattgtcacctattcttggctcgttaaacccttattaccttggttttaaaattttaaaggatatagaagatagatatggcagagataaaatttttgaggttagagaaattgagagggatgaatcttttataagaaaatatcttactagggaactatgtgaggaattaaatctatttgaattttccaaaagaagaggagaatatataatagataatgttgcagatgaagagggatggaaaaatataagaaactcaatatgctcaggatgtggtatgaatagtataccagtaataagagttgtagaattgtctaaaaaggataacaatttgatattggagcatctttacgatggaagggaacttaatatgcagtatgcagaggaaaccttaaaatatgtggttaacttgtggaagggtaaagttactttaaaaactactattgaaggaaaagagtacaggatagtatgtgatgagaataaaaaaatatgtgaagtgaaataaatatatatcatttgcattatagggaaaataggactttgtagtcttattttcctatataaatatattttaaaataatattgacataaggataaaataattataagatataactgataatgataattattatcgataaactctttaactctctcgaacattgactgctgcaaattagaaattttatttgtggcagtctttttgtttaaaattagatttaatttatgagtattgctattgttatcagttataagttaaaattaaagttatagggaaaataattgaaatattaaattataagttgttttcctgtaacaatacgaaaattaggagtctatacaatgttagatataataatagcagttataattgattggattattggagatccttattggtttccacatccagttatatatataggaaaattaataaaaatgttagaaaagcttggaagaaggttctttaagcaagataagtggcttcttgtatttggaggttttatagtaataatagtatcaagcataagctttttaataccatttataatactgcaaggtgttaaaaagtttcaagttatataccatgttataaatattttttttctttggactgtacttgcggcaaaaagtctacataaggaagggaaaaaggtatatactgcccttgaaaagaaagatattgaggatgcaagattaaagctttcatacatagtaggaaggcagacagaaggactttcaaagaaggaaataatacgagctgatgtagaaacaatagccgaaaattcatcagatggtataattgctccacttctatttgcaatgttagggggagcgcctttagctatgatgtataaaggtataaatactatggattctatgcttggatatatgaattttaaatacagatatataggcttttttcctgcaaaaatagatgacttatttaattttataccggcaagagtaacaggaattataatgtgcctggtttcaccaataataggaggaaacatattttatagtataaagataatgttaagagatagaaaaaatcataaaagtcctaattgtgcttatccagaagctgcagcagctgctgctagtgggataatgcttggtggaactaatatatattttggagaagttgtagaaaagccaactattggagaagagaaaaatgaactttcagattttcatataacgaaaacaataatactcatgtattcatctgaaattttatttattattatttatgttataattatatgctttttaggtaaacattaattttataaaaggtgatgttactattgaaaaaaggaattttaattgtagggtttggaacgatatacaaggatgctagagcatgtactatagacaaaataaaggaagaagtatgtaagcaatttccagactatgaggtactgcaggcatttacttcaagtaaaattatagagaaaataaaagaaacagaaggaatagattttgatactcctcaaaaagctttgcataaatttaaaaataaagcatatagagaagtaataattcaaccgatatatatgatacctggatatgaatatgaaaaacttataggaacagtagataagtatttaaaagattttgaaaggttaaagattggaagacccgttttatactttaaaggaaacaacaagaatgagcccaacgattatgaaatttttctagaaaaaataaaagatatgattccaaaagataagataacagtttttatgtgccacggaaccatgcatgagtctaacgaatactatctaaagcttgattcttttataaaaaaacatggatttacaagtgtggtaatagctacattagaaggttttccaaaggtagaagatgtaattgagtacatggaaaaaaacaaatttaaagaaaaatataaaggtgaagtaaagataattccacttcttgttacagcaggaaagcacgtaaagaaagatatgcaagaagagtgggttaatatatttaaagataaaggatataaggttgaaacttatgaacatggtttaggcgagatttatgattttagaagtatatatatacagcatattaaagatgctattataagagaaaattatactgcactatagataaattaagacataaagggagaaaatagtatgatttatgtagttggaataggaccaggaaataaaaaatatatacttccattagcagaagaaattataagcaaaagcaatgttgccattggttttaaaagagctattaatagtatagactatatacaagtgaaaaaaactatagttgattccatgaaggatataatttcatttataaatttaaatacacaacaagatatttccattttagcctctggtgacccatgcttttatggcatattgaactatataaaaaaaaattacgaatatgaaattcaagtgataccaggtataagttcattccaatatttcatggcaaagctcggaaagtcttggaataatgcttatgtttcaagtattcatgggagaaataaagattttattaaaattataagggaaaatgaagttactgtttggcttacagataagcaaaattcaccaaattatatttgcaaagagttaaagcagaatagtatagaagcaaaggtatatgttggagaaaatttatcctatgaagatgagaaaataagaataggaagtgtagatactatattaagtatggtatttaatgaattatgcgtagtagttgtagaaaagcattaagatgctattgaagacaatagtattttaatatataagatgtaatttaagggcaatgaatattgtaactaaattaaatattacgatagtaataggaggaaatttagtatgaaaaatccaagaatagtagttgtagatgattcacctttttctgtttcaattttgacagatatgcttcaaagaaatggatttgaggtggtaggaagtgcaagtaatcttaatgaggttaaaaaagctgtaacggaattaaatcctaatttagtaactatggatatggttttagcagatactgatggacttgaatgcaccaagataatacatcaaataaatccagaaataagggttatagctataagctcaatgatggatgatgagattctagcgaaggctaaaaaaaataatataagcgcatatatacaaaaaccaattgatgaagaagaattggtgcttgcaataaatagaatatcatcagatgatgatttgtattcagaacttaaggatagatattttgatatatttaagcaggcattttcgtacgcttttaataaatttataaaagaagttcctaactttgttgaaaaagatgaacatacagttgagcatgtagaaaagggtatatctatagttatgggcattataggaaagtattgtggtagattaattctaaatatatcctatgaaactgccgataaatttgtagagtcggtattaaacagaccagcaaaggatttgcaagaaatattaaacgtggtagcagagtttgcaaatatagttggtggaaatgcatgttcaatgataaatagagagaataaaatatttgggatgagaatagcaccacctactacaatttatggagactctattaatatatctagaaacagtcttgatacaatgaactttttcacagttaatgttacagctggggagataagtgtcaatattggattcaataagggggcagtagaatggatgtcaaatatataaatccttttttaaaatcatttatgaatgtaatgccacaacttggtttaaccaatattaaaagaggaaaggttaagcttaagggaaactccattgagagttcaggtgttatgattataataggcattgtgggagatatcaaaggaaatgtaatgtattcaacaacaatagatgctgcaaaaaaaatagcatctacaatgatgatggggatgcctgtaaatgaactcgacgaaatggctcagagtgcggtttcagagcttacaaatatgttaacagccaatgcagctactaattttgaagaggacagtgtaaatatagatatatcaactcctgcgctaatgtatggtgagtttactgccagcgcgaattatggaaaagttctatgtattgagatgtttgtggatgatatgccatttgagataaatgtttcattaaatgttatgtagaatttatatacataattagagcacatttgtgattagaaattttaaatttatcacaaatgtgtattttttttcgctattttactaaaagcattgacaatagagggaaaaaattataatatatacttgataatgaaaatcaatatcaacaaataaaattaaatatgtaggaggagttttatggtgaaaataaacataatttattgctcaggaactggaaatactgaggcaatggctaatttgataagtgaaggagcaaaatcagctggagcagatgttcaattaatcaatgtaagtgatgcagatgtagataaagttaaaaatgcggatgttattgtgcttgggtcgcctgcaatgggtgatgaggtattagaagaagaagaaatggaaccatttgttgagaatatatccaaagaggtgaaagggaaaaaagtagctctatttggttcatacggttggggagatggccaatttatgcgtgattgggtagaacgtatggagggatatggagcagatcttataggtgaaggtttaatcgtacaagatgcaccagagggagaaacagaagatcaatgcagagagtttggtaaggctcttataaatagctagaaaagggagagatagaggatggaaaaatgtttatataaatttacagattttatcgagggtgttactggtaaagtatatatgataaagcttataacatactcaatatctccagttatatctaaacgaaaaccatcttctataattactgtttcaaacaggtacaaggggatgtatgatttatggaatatatatggggaagaatatttaagaaatataaatgtagatgtttttgaaattaaaaaagataaggattgcttaacacttttgttttatgataaagcgttacttaaaagtactctttatcataaaactaatataggctttttaaataaatttggatataaagaagatatggatttagaggagtttcttggagttttaaagaagaggtataaagaaacaaattgtcctcacgaactaggaatatttttagggataccagttgaagatgtagaagagtttataaattgcaatggaagaaagtgtttatactgtggctactggaaggtgtataaaaataaggacagggcaatgaaaatttttaaggaatatgatgaatcacgcagtaaggcaataagattattaagtgacaatattgatataagtaaggttgcaaaaatactatcacttaataattaaataaattttagtagaatttattaagagttacttcaccagatattaaattttcagtatgaccgtcattaaaggtaactactaattcaccttttctgcttatgtctattactttagcagcttcagtgtggtctttttttgtaatagcaatttcctttcctataagcgctgaattttttttgcatatgtctaaaaagctattgggatcttgagtctctaaaaagttttcatagattatttcgaagtcatttaatatgttagatagtatggtttctcttgagattggttcatttaattctattcttaaagaagtagctttttttgatatctctggcgaaaaatcattgtaatcttgatttacgtttattccaattcctaaaattatatttgaagtgttattgatgtcttcagaaacctcagctagaatacctactagttttttattatttagaaggatatcgttaggccactttattagacaattgatgttcattttattaaaagagttagtaagagaggctgctgctaactgtgttattagaggaaaaagtgttttttttacgttaggttttaaaattagtgacatccataagcccttatatttaggtgaactccaggttctatctgaaaatctacattttccaagggtttgctcttcagaaattataagacttccttcagctacagctctcattataagacgcttggcttctaaatttgttgaatctatagaatctaaaagtattaaatttcttccgatatatttcgtggttaatagtgaatttattttatttatatttaaagaaaaattccctctttccattatttagcctccagataagtataatatatattatgaattatagcatatttatggagtgttgacatggaaaatattaagtagtatactaatggtaatttaataggatgttcttcagggatgggtgaaattcccaatcggcggtaaagcccgcaagccatttggcagatccggttaaactccggggccgacagttaaagtctggatgaaagaagaaatagcgtaactgcagtacgcaggttttgttgattataaatctccgaaggattacctttctttggagatttttttatttgcttgcaagtttattaaattcaaggaagtgtttaaattgaatgaggcttttatgaaaagagctttagaaattgcagaaaaggggagtggatatgtaaatccaaatcctatggttggagcagttatagttaaggacaataaaatagttggtgaaggttatcatgagaaatttggaggaaatcatgctgaggtaaatgctttaaatatggctggaaaagatgcagagggctcggaactatatgttacgttagaaccatgttctcattatggtaaaactccgccttgtgcacttgcggtagttaaagcgggaataaaaagagtgataattgccatggaagacccaaatcctttagtaagtacaaaggggataaaaatactaaaggaaaatggaatagaagttattacaggcgttatgaaaaaggaatcagaaaagttaaatgaagtttttataaagtatataacaactaaaaggccatttataactatgaaaatggcatcaaccctagatggaaaaatatgcactgtttcaggagaatcaagatggataagcggacaaacatcaagaaaatatgttcatcatttaagaagcaaatatatgagcataatggtgggagtaggtacggctattaatgataatcctcttctcacaactagaatagaaggtgaaaatgtaagaagtcctatagctattattgtggactcaaagcttagggttccaaaggatttaagaatttttaatacattacaggagagaaagattattattgcaactactgaatatgcagataaaaataaggaaaatgagcttataaatatgggagtttcaattataaaaacacctaataaaaatggtcgtgttaacttagattatctactagatgaattaggtaagataggtatagatagtgttttactcgaaggtggaagcgaattgaatttctcttttataaaggaagaaaatatagataagataatgtgctttatagcgccaatgatagtaggaggagaaaaagctaagggtgcagttggaggtaaggggatagaaaagcttaaggattcaataaagatatatgatatggattctgaaaaaattggagaggatatcttagtgtcaggatacctaaataggggatgatttgttttgtttaccggtattatagaggaaataggagaaattaaaactataaagaaatatgataattcaataaggattgctataaaagcttcaaaggtaatggaaaatatcaagcttggagatagcatagcagtaaacggagtatgccttacaattgtatcttgtgaaaatggagaatttgatgttatgccagaaacatatagggtaactaatttaaaaaaattgatttcaggaagtaaagttaatttagaaagagctttggcattaggagatagatttggtggacatatagtaacaggacatatagatgggttgggaactatagagagtataaaaaaagatgcgatagcaattgaatataaaataaagactaatagagaaattacaagcaatcttgtttataaaggttctgtagctatagatggagttagtttaactttaggagaagtacaagaagattattttaaattttatcttattcctcatacccaggaaaaaacaactttaacacaaaggagtaaaggttatagtgtaaacatagagtgtgatgtattatcaaaaaatattcgaaattttgtgaatatccagaatagtacaaaaggttcgtgtataactgaaggtttattaaaggaaaatggatttatgtaatattagttaagtgtattctgtaataagaggaggagtttttatgaatttcaaatttaatactgtagaagaagcaattcttgatataagacaaggaaagatggttattgttgtagacgatgaagatagagaaaacgaaggagatttggtggcagcaggagcaacgataacaggagaaactataaattatatggcaaggtatgccagaggactcatatgtacgcctatggattcagatagcatggaaaggcttggaataaacaccatggtagaaaaaaatacagagtatttcggtacggattttggggtttctgtagatgctgcaaggactagaacaggaatttcagcatatgaaagagctgaaactataaagaaactttctgataaagatgccaaggaagaagattttgtaaaaccaggacacacatttcctctaagagctaaaaaaaatggagtattggatagaaatggacatacagaggctaccgttgatttagtaagacttgcaggtttctatccttcagttggagtatgctgtgaaattatgaatgaagatggcactatggcaagactaccaaagcttatggagttctcaagaaaaaatgatattaaaataataactgttgaaaaattgattgaatatagaaaaaagaatgaggcacttataaaaagagaagcagaggccaagcttccaacaaaatatggtgagttcaaaatagttggatataaaagcctgattgataataaggaaaatctagctatagttaagggagagcttaaagctgaagaagaggtgcttgtaagagttcattctaaatgccttacgggagatgtatttggatctctaagatgtgattgtggaaatcagctttcatatgcacttagtgcaatagaaaagcagggggcaggagttgttctttatatggatcaagagggaagagatataggacttttgaataagttaaaggcatatatgctccaagaaaagggtcttgatacagttgaagcaaatttgaaattaggatttgaagctgatttaagagaatattgggcggctgccgaaatgcttaaagatttaggtgttaaaaaagttaaattaatgacaaataatcctgaaaaaataaacgaattaaataaatatggaattgatgttgtaagcagagttcctattaatacagaacatgttaaagaaaatgaattttatctaagaactaaaaagcaaaaaatgggtcacttaattgaaatttaaaggagagtagattgtaatgaaaatatatgaaggcaaacttataagcaaaaatttaaaatttggaattgtagcagggagatttaatgaatttatagtatcaaaattgctatcaggtgcagtagatgcgcttaaaaggcatggatgtgatgaagatagtatagagcttgcatgggctccgggagcttttgaaataccattaatatcacagaagatggctgaaagtggtaaatatgatgcagtaatttgcttaggtgctgtgataagaggagcaacctcacactttgactatgtatcttcagaggtttctaaaggaatagcacaaacttcacttaagacggggtgccctgtaatatttggtgttttaacaacggataatattgaacaggcaatagaaagagctggaacaaaatcaggaaataaaggttttgatgcagcagtaacagcaattgaaatggctaatttaattaaaacaattggcgaataggaaatataaataaatgtacccatacacttttcaaaatgatatacatgtcctattatagaattatattttatagtaaaggagttatgggtatggatagaagtgatatgaataaaaatctcgctcaaatgttaaagggtggagttataatggatgttattaataaggaacaggccataattgctgaaaaggcaggggcatgtgcagtaatggcactagaaagagtaccagctgatataagaaaacaaggtggagtagcaagaatgtctgatcctaaaatgataaaagaaattagggagtctgtaacaataccagttatggcaaaggttagaatagggcattttgttgaagccgagattcttcagtctttaggaatagattttatagatgaaagtgaggttctaactccagctgatgattcttatcatattgacaaaaaggcctttaaggttccatttgtttgtggagcaagaaatcttggagaagcacttagaagaattggggaaggagcttcaatgataagaacaaagggtgaagcaggtactggaaatgttgttgaagctgtaaaacatatgagaacagttatggatgaaataaggagagttaaaaatgcagctaaggaagaaattatgacaattgcaaaagaattaggagctccatatgatctcgttcaatatgtttggatgaatggaaggcttcctgtagttaattttgcagcaggcggtgttgctactccagctgatgctgcgcttatgattagacttggtgcagaaggagtatttgttggctccggtatatttaagtctgaaaatccagaaaaaagagcgagagctattgtaatggcagcagcttattacgatgatcctaaagtgcttgaagaagtgtcggaggaccttggagagcctatgtatggacttgaaataagtgacataaaagatagatatgcagaaagaggctggtaatgagggtaggtgttttatcgtttcaaggtggagtagttgaacacctggagcatatagaaaaacttaatggtaaacctgttaaggttagaagtttagaagatttacaaaaaatagataggcttataataccaggaggagaaagtacaactataggaaagtttttaaaacaatctaatatgctccaacctttgagagaaaagatatatggaggcatgccagtatggggaacctgcgcgggaatgatactcttagcaagaaaaatagaaaacagtgaggtcaactatataaatgccatagacataactgtaagaagaaatgcttatggaagccaagttgatagctttaatactaaggctttaattgaagaaatatctttaaatgaaatgccgcttgtttttataagagctccgtatataacacgcataggagaaacagtaaaagcattatgtactatagataaaaatatagtggcggccaaaagtaacaatgttttagtaacatcttttcaccccgaactagcagataatttagaatttcatgaatattttatgaagttatgaagacaatttataaaactgtgatttaaagaaggaaacttatttaaattacagttttattattttactcgtttatatattttttgtgattggtaataataaaaaacaattaattaagtatttaaggaaactaaatgtagtcaaaataaataacaggaatcaaagaaaggaaaatagtaatggatttttcatcgcgttttcgttcatttaaaggaaagtatattaagaatgacaaaaagagagttaataatattatcgaagatataagggaagctattggtgacacaagtaggttgatagtcagagaaattttaataggtcaaaggcagcagctagaggcagtaataatgtatgcaaatggcttggctaatagggatataatagatagcggtattctcaatccattaatgtttaaagttaatgaggagtttactcctagctcaaatatagaaaattatttatgtaaaaaatatattgctgttagtaatacttacatagaagaaaatttcgaaaaggtagttgaaaatataaaaagaggaaaaactatagttgtagttaaagggtcaaaaaaatttgttgtagttgatacaacaggaggtccatatagatcaattgaagaaccacctagtgatctatctttaagaggtcctagagaggggtttattgaaaatttagaaactaatttaactatgttaagaagaagaataaaggataaaaacttaaaaacagaaaaatttacattgggaagaagaagtcagacagatctcattatggtgtatatcgatgatgtggtagataaagaatatttgaaaaagataaaggatgaggtaaaaaaaatagatattgattctgttccggcaaacagtacaatagaacaatgtatagaagagcatacttatagtatttttccacagatttttggatctgaaagaccggatgttatagcagcacatcttatggagggaagaatagcctttctattagagggaacttcttatgtgactgtatatccgagtactttttttgatttttttcagacaatagaagattactatggtagaacaattcaagctatatttataagaattataagaattatagctgtatttatagtaacaagtttgccagctatttatataacttttataaaatttaacgcagagctcattcctattgaatttgtagcaactcttattcagtctagaaaaggtatagctttaaccccttttatgtccttattatcaatgaattttacaatagagttactaagggagggaggatataggctgccaagtaaaataggtcaaacgcttagtgttgttgggggtattattattggagatgctgcacttaaagctaagattgttagttctgctactctattagttgcaggaattactacagtagcagcctttgtaatatcaaattatcaaatgtccacatcaataaggttaattaattatccaatgctaatattagctaattggcttggtgtacttggaatagtaattggttggttttttataatagcatatttgtgttctaaagaaaactttggagtaccttatttttcttttaataaaagtgatatcaaagatatatttgtaagagcaccaatatggcaaatggatgaaagacctagaattattccaaatcataatcctgttagacagaaggattttaagggtggtaaaaatgaatagatataaggatgtatacttatcagcaagccaaattacttttttaatgttttcttccttgattggcgttggatttacctatttacctatttcagttattaaacaggcaagtcaagatgggtggatagcgtgtattattggagctatatatcctttattattagtgttaatggcaagttatatatgcaaaaaatcacctaaagaaaatattctaatgctaagtaaaaaatattttggaagtataattggaaatacctttaactgtatttttatgttattttttatatttattctaacctctgaaattgctggatttagtaatgtgtttattgtatatgcaacaggttttttgaaatcctatcaagtaattgcagtggttttattagtaacggcatatatggcatttaaaggcttgaagccggttgcaagattatgtgaggtgttattttatttattgatagttttacttttattgcctattggagttttaaaagaaggaaatcctttaaatgttatgccagtgggaggatcgggtctagttaatataattaaggcttcaaaggacactatgtttttttatactggagctgaacttgctctactaatatacccattttctttaagtagtaaaaaatttttgaagagttgcattttatcacttggtttagttgtaattatttatacattagttacttttttaactatttattattatggcatagatgcagcgcctaaattattgtggccaacaataggattaagtgacagcttacatgttccaattataaatagttttagatacatatttatatcactatggtcactagtaatattacgatgtatttctgtttattattttgcagtttcttttggaattagcagaataataaagaaaataccttccgagagtgtaactgtattcatatatccagtagcttttgtactgtgtatgttatatcaaaacccaaccaatagacgtagttattcagatatattagtgcgttattttgtgatatttaatttttgctatgtttttataatattaattataacggtgttcaagaaaggtgaaagacatgaaaataaataataagttattatttattccagtaatactaatatttattgcggtgttcataggaggaaaaggagagttagtagagaatttggaaataccagtaggagtcggtgtggatgtggagaaaacacctagtggtatagcatataaaatacctatagtagtttattcatttgaggatgctaataaaatagaaagttaccaactgcttggagaaggtagtattccaccagatactaggcaggatagacaacttaaggcaaataagaaatttattttaggattaaataaaatatttgtatatagcgaagcctccgcaaagaatggactaaagcctttcttggatttgaacttaaacaacccagaaataaatgatagagcttggtgtgtaatttttaaaggaaaagcacaggatattctcaattataaggttaaagggtataaaagttcttcggattacatagagggaatgataaaaaatttaaatgaatttaactttttctccaaacagtatacttttacagatatttttgtaagatgtagtactgaaggtagaacggcgttgttaccatatatagaaataaaggatggattaatacagacaacaggacttgctatattcaataaggataaaatggttgctaatgtaggtattgaagaaagcagagtaataaatatgttaaaagaaaataatgtaaagggtattgtgtctgttgaaagatctcctaagaggtacacaagtttttatggagtaactaaaaggaaaattaaatgctataaaaaagatggaaaatatcaatttataataaacttaaaattaaaggggaaaattgtaacaaatcaattatataaaaatattacttcagactccaggcagctacaaaagtttaaatttttactagaaaaatcagtggaacaaaattgcaatcaaaccataaaggatataacaaaaaaatataaagtggatgttttagatttgggtagagttgcaactgcaaaatatggcaaacatactggaactgattggaataaggctgtaagtgaatctgatataaaagttaatgtaaaagttgagattgatgatgaaggaagaggtgattattagttaggagagacttcaacataccggggatatggaatgaaattagtggtgacaattataagtagattagttaatataatatttataatttgtacaaaaaataaattgccataacatattgaattaaaaaattatatttattatagtatatatataataatatattaaaatacatcaaaagaaggtggttttttgctgataagaatagattttgaatcggaaacacctatatatgaacagttaaaaaatcaattagttataggtatggctaagggggagttaaggagaggagaaagtcttccttctgtgaggcaaatggcagaggatatagggataaatttgcatactgtcaataaagtatataacatattgaagcaggaaggatatcttaatatcgacagaagaataggtgctgtgataaacgaaaatatgcccgaaagaaccgaagaattttcagaaaaattgattaaggagcttgaatatgttattgcagattgtaaatgcagagatataagtaaaaaagaatttttagatatatgcagtaagatttatgatgattataattcgtagctttggaggatgtttttatgaatgatggaagaatgttaggtttatttacttttattataatgattatcagtataatatctcaaataatagcattaagtgcatctcaacgaaatatatatttgggaatcagaattccacaagaagaaataaataatacaaaaataaaggcaatcgggaaaagatacatatggtctaatcttcttttgggaataccaattgcagctttactctcttactgtgtgtataaaattaataatgatattttatatttagcagctataattttatttatggcaataagttttttgctttactattattataatagaaagattttaaaaataaaaaaagaagaaggttggctaaaaactaagaagcaggaaatagttattgatacatcctttgccaaaagaaaaagtgaaagaatggttgcaggaagcagatggtttttattatcgctaatatttattgttatatgcttgattgttaacgttaagcaatatcccaatattccatataggtatccaactcattgggatattaacggaagaccaaatgcatactcacttaaatcttatatgactattttttctatgcctattaatcagcttattttaattgcagttatgtttttttcttataaaataacgttttggagtaagaacgaattggatggaagaaatccaaaggattcaggagaaagaaatataaaattcagaaatgtgtgggctatatatgcaatagtagttaattttttcctccaaatcatatttttaattcaagattttcaaataatgcatatagttaatacaaatcctaaatttataattattgcagtcataacaatgactattgtagtaatctgttcgtctctaattatatcaataaaggttggacaaggaggaagtagacttaagacaagagggaataagtctgaatttggaatcaacatgagagatgacgataagtattggaggttaggaaatctattctattgtaataaaaatgatccatcaatttttgttcaaaagagatttggaattggatggactgtaaatgtaggaaacaagtttggagtgcttttttatgtgctaataattgtttttcttataatatgtattgctatatctaggtgaataaaataaaaaaataatattgaaagctgtcctttaaatgtaaatctaagttacatcatataggacagctttcagtcttagaacctaaaatcatctcaattacgacccatatgcataactacacacctaagtacccctttttttattacttaagcactttgttacagacataagttttcattcgatttattaacatacctttaaaaactataacaatatttcaattattataacctctaaagaaaaattaataaatcttcgctcaactattgtaaatcaatatattacctcatatagtttaccctatataaagcgatatacaaacttataacaattttcctccgacatacataaaacctagcggggttaaaggttagatctcatatacatctttggtcgaataatttcgagcttaaactaataaaaataaaccctaattactcttcgctcaacaactttaaatcccttgacagtattataatgcccaataaaattttttatatgtatcatttttataaaatataattaaaagagagctatccctcaaatgcaagtgtcggttacatttttagaatagctcccttatcataagatttaaggttatatataacgccacacctaaacaatccatttattacattatttaagcacttgttatatacaatattcagtgcattgattaaaatacaatataaataaattaatgaataatcactgaataaccttaaattctttgacgctattataatgcccaatataatcttttatattcatgaaaattaagtttgtgagattgctattttgaagcttaaatgtataaatgttgaaaaaaagtaataggatatatagaaaaactattacaagatttagggtatagtattttttaaaaatggaggatgagagaatgatggatagtaaatttgaaattaataagcttcaagaacagcttaaaagagatccctttgaaaagtatgaagaatatgaaatacgcataagaaatgtaaagtctgtaattgtaggaaagggaactcttgaagaggagagctacgataaagattatgggttttgctatataaaaattgagtggtatggaattaattcagtggaaaaggtaaaaagcgaatattttttttgtatgataagcaaaaggaatttaaatggagatgttgattttaataacaaatatgacgtgagttgtaaatttgtatccataggtgaaaaggtatatattgataatgaaagtttaaatataagtattaatggagaaaattataagatatattgtgtaaatctttatagacaagcttttgaaagtaatgaggagtttaaaactagaataacaaatataaagcatataccaattggaagagtaaaatttaataaaaataattacgatataaaaacatactcgggtatagttggaaatgaatggaatgtaataaaggaagtaaggatacctaaaatatacagtctttttacagctatcgataatgtggctataaaggaaatatgtaaagtagatgttgaatatgttttgtatgggaagcttatgttaatagataaagctataagtatagatatgggaagtttatttataatgattaacaataagtctgttcccatatattcaatttgccttaatagtatgtatttttatgatgtaaacaagtttaaaaacaatattgagcatatatctatgataagtgcagggaaggtaagaatgaatccatctaagtatgattttgaaagtagtacttttcttgtagatgtaatatggaaaaagtgggctgctccttttgtaaatgacttatgttcattttctataagcatatcaaaagaagatgcaagtattctttacaaaggagggggcgtatatgatgtttatataaactttgaaatccaggaagataaaatttctgtagatagcattaatgttattacctttagtaaaaatataaaacttgaatatgaagttcaaagtagtgaaagtgtttcacaagtgatagataatggagtacagatacaaaatgatttaaatcaagatatgaatatggaatttaatttgatgagatatataagtgataaaggtaagtatggatatatggatagttcaaagagaaagattttaatagaacctaagtatgattatataggaagcttttatgagggccttgcgagggtcaatataaatggtagttgggggtttataaatttaaatggtgatattgttatagaacctaaatttagtatggtaaaagattttcatgatggacttgcagcctttagtttgaaaaaatttggcacaaagaggtggggatatgttaatttaagtggtaaaattgtaattgaggctaagtattcagaagctggagatttttacaatggggttgcaagtgttagacttcaagggatttttgcttctaaaaagaatatatatataagcagtgatggtaaaatagttaattacaaacaaatgcttagtgttaaataaacatattaaaaaattatttataacatttaaggataaattatggtattatagtataacgatgaggaggagatgggatgtttgataataaagatttcaaagataacaagtataagtatgctattttttatacactaggggcaataatttttgtcctattggttaattatgcagcatcctcaataagaactgaagaaataacatataataaatttctcgatttattaaatgcaaaaaaagtttcacaggttaatatttcagatgaaaagataatgatagtgccaaaagagaatgctggctttcataaaaagattctatatacaggtagaatagaagatccggatttaaaaactgagcttaagaaatcaggagcagaaataaagccagagataaaaaatgatgatccaataaagaattttttaatcacatggattttgccgataatacttcttgctttctttggtaagattttatttggaaaactggataaaaagtttggtaatggagttatgtcttttggtaagaataatgctaaattatatgcagaaagtgaaacaggaaaaacctttgaagatgttgctggacaggaagaagcaaaagagtctcttgtggaaattgtagattttctacataatcctaataaatatgcagaaataggagctaaacttcctaagggagcacttttagttggtccgccaggtacaggaaaaactcttttagcaaaggctgtagctggagaggccaaagtaccatttttttcaatgtcaggttctgattttgttgaaatgtttgttggaatgggagctgcaagggttagagatttatttgagcaagctcaagaaaaggcaccttgtataatatttatagatgaaatagacgccataggtaagagtagagaaaatacacttggaggctctaatgatgagagagagcaaactttaaatcagcttttagcagaaatggatggttttgattcgtcaaagggagttgttattttagctgcaactaatagaccagagattttagataaggcacttttaaggcctggaagatttgatagaagagttatagtagatagacctgatttaaaaggtagggaggctatacttaaagttcatgctaaagatgttaagatgtcagaggatatatctcttgaagaaatagcaaaagcaacctcaggtgctgttggagctgatcttgcaaatatagtaaatgaagctgcacttttagctgtaaagaatggaaggaataaggtttatcaggaagatctagataaggcagttgaatttataattgcaggaaaagaaaagaaagataagatattgtcagataaagacaagaagacagttgcatatcatgaagttggtcatgcgttagtagcggctcttttaaaacatactaatccggtacataaaataactattgtgcctacaactatgggagcattgggatatactatgcagcttccagaagaagaaaaatatcttgtaactaaagatgaaatgatggatgagatatctgttctacttggaggaaggtcctcagaggaagttgtttttggaactatttcaacgggagcatcaaatgatatagaaaaagccacacaaactgctagaaatatggttacaatatatggaatgactgataagtttgatatgatggcacttcagtctcaaggaagtagatatttagatggaactcctgctaaaaattgtagcaatgaagttgagtatgaagcagataaagaggtattaagaattataaaagaagcacataataaagcaaaggatattttaaaggcgaatagagagcttcttgatagtattgcagaaattcttcttgtgaaagaaacattaactggcagcgaatttatgaaaattgtaaaggagagctcagcatggaaagagatgaacgaaatacagatggagaagttaacagattaattgaggaaaaaaataaggccgaggaacttgaaagtgaagctttaaaattaaaaggcgttattgagattataaatagggaaataattcagtatataaataagaaaaaagaaatctcacagtatataattgaagaaagagaaaagactcttgaagattacgcagatgatgaagataagataatagaatattttgatcatgaaagatatgttaaggaagaaacctttagtatcatatataaaagacttaaagaattaaatatcttattatcctcaccttactttggaaagattgactttgaagaggagggtttaggagaagaaaaaatatatataggtagatttggagttacaccaagcggagggtatgaacctttagtagttgactggagagcacctatagcttctctcttttatactcctgaattagggcaaactagatataaagctccagctggagacgtaactgtaaatgtaaaaggtaagaggcaatatataataaaaaaaggtaaacttgaaggattttttgattcggaagttgatgtaaaagatgaaatacttcaaatggttttaagtaaaaatacaggagataaactccgcgatattgtaatgacaatacaatctgagcaggacaatattataaggcaggaaagaaataaaatatcagtagtaaatggagttgctggaagtggtaagacaactatagcacttcatagagttgcgttccttttgtataattacagaaccatacttcaagataaaattttaattttaggacctaatccagtttttatggaatacataaaaaatgtactcccaagtcttggagaagaaaatgtaagacaggagacttttgttgattttgcacttgatatacttccacttgatacttacgatattatgagtactagagattatatggaaaaaattcttatggaagatgaagaatttatacaggatgttaagcgtaaaacttctgataactatataactgcacttgataatcttgtttctgagatagaaagacaatataaggataatatgcaggatgtgttttatggagatataagagcagttagcagaggagaaatagtagagctttttactgaatactatgaatatatgcctctttttagaagaaataaaaaaataagaagaataatttttagtaagcttaaagacataagagatgagaagattaggcaaatacaaaaggaatatgaagaggcagttaagaacagtacttctgaagaactaaatttgcagggaaataagcttatgtttcagagaaagcttaaaatacgtgaaactctaaggcgacttatggaggctaagagatctcttacatggcttgataacattgatgtacttgaaatttataaaaggcttaacggtgacaaaatatatactatagatgacgtagcaccgcttatgtatattaaaataaggttagatggagtaaaacttgaacgtgaggtaaagcatgtagttatagatgaggcacaggattatagtaaactgcagtttattgtgataaagaaacttacaaattgtcttggcatgactattgttggagattcaaatcaaagattgattccaaaatttgatgaaaaaattgctatggaaagaatggatactatctttgaagatatggattttgaaatgtttaagcttgacaaaagctatagatcaactaaggaaataatggaatacgccaatagatttttaaatgacacgagtataattccaatggttagaagtggtgagaaggttcaaagtttatccattagcagtgaagatgaatttgtagatagggttacttatgccattgacgatatgaaaaaagaaggaattgaaacaataggtgtaatatgtgaaaatatgcatgacactaaatatttcggtgaactactaaaaagcaaaaagtatataaatataatagaaaaagaaaatcaaatttatacaggtggagagacagttatgccttcttattttgctaaaggattagagttcgatggtgtaattcttgtaagtagagaaaataaagagaataaagatagggttttatatgttatggctactagagctcttcataaattgtatgattttcatatagagttttaaggtgtacctccagaataatttttacctttaagggtaaaaatacttttggaggtgttttaaatgaaaaagttactatatatttctgtgaatacaaaaccggaaggaatgtccgcaagtaaaactgtaggaagagagtttgtggatagatttgtacagaattatccagagtatcagcttatagaacatgatatatgtaatgaatatatccccgagctagatcatagatttttaaatgataatggagatattgtatcaggaaatgactacaatttattaagtgacaatgacaaaaaaatagtggataggataaatgatctttgcaatgaatttgtaagtgcagatgtatatgtaattgcatatccaatgtggagctctctttttcctccaaggcttaaaatgtacattgattgtattgtgcaaaatggtaagactataaaaatttcagaagatgaatctagtggactcttaagcgataaggagagaagtgttctttgtatacaatcttctggaggtgtatatcctaagataatttcatggaaaataaatcatggaattaattatcttcatgatatttttagacatttaggaataaaaaaattcgaaaagcttcttgttgaaggagtagatgttcaggacataggaaaagaaaaagccgtagaaaaagcttttgatgaaattgatgaattaatagataaaatgcaggttagagattttgtaaagcagtgagttaagtataatgaaatggggggttaagattgctatttaatattttaactggagagtataatatagtcataataaaatttttacagcaattctctaatccctttttagataaaattgcccaagcggttaccatgacagcagaagaatattttctagttggatttataggaataatatatttatgtataaataagaggcttggatatataatggcattaacaatcttatttagcagtacaataaattattatgtcaagtgtatttttaagataaaaagacctataggaacccaaggtgtgaggtctcttagacttcaaacagcagatggatattcttttccaagtggacatacccagggggcagctgtattttggggatgtttgatcaaaaatataagaaatagatatatagatatgcttggttatgtaatgatatttttagtcgctatttcaagaatttatctcggagttcacagaccaatagatgttataggtggatttgtatttggtattttgtgtgtaggaatttttaatagagtatttagattaaatgtatataagaaaaacttacttatatttattttagtgattcttccaatgcttacaattaccatatatataggagattttaaattatatgaagaattggggtctattcttgggctcataagtggtcataatattcaggagaaatacataaagtttaatcctaaaactaatataagaaacaatttaataaaaattattatagcagtcttaggaattttaatcttgaagaatattttagattttatttttcctcatactagattaatttcttttataacttatttttgtattttgttttggattactaccggtaacctatggattataaagaaaataggattgaatggagtttaaaaaactaattaaaggctagatcataaataacttgatctagcctttaaaattcttactaaataccagaataatctctatcaacggtaattacgcaatcgtaatgaggatgtctccttatgatttcacttttaatatcatcacctaacttactgagctttttttcagatatatcaacatcaaaaggaacaacgatatcaaaaattaatttcttatcttcaccatcaccaactattctaaaatcatgaaaagattgaaccgatgggaaatccttaagtatctttgaaacataccttttagcttcacttacttctggagatcctattaagagaggatccatatgaataaccacaaatatatcaagctcttctgatatccttttttctgtttcatctattttgctgtgcagagtcataataggaatattatatggaacctcagcatggaaagaaatcatggttcttccgggtccataattatgaattataaggtcatgtactcctaaaataacatcgcacttaagagccattttttttatagactttacaaggttagggtcaggagcttgacctaaaagaggatctattgtatccttcattaagtttacggctgaccatattataagagcaccgattaaaacacctacatatccatctatagatatagttgaaaaagcggatactaaaagtgataaaataacacttgaaagtatatatacatcgttaagcgcgtcagctccagatgcttttagagctgaagagttgatttttttaccgatatttttgttaaataagcttagccataatttaagaggtattgcaattagcattattataaaagaaattagattaaaacttactggctcaggtgatagtattcttaagaatgaggtttttatgaattcaacacctacgagcaaaattattgcagataccagtagggcagataaatactctactcttccatgaccaaatggatgctctttatcagcaggtttatttgatagcttaaagcctataagggttataacagaagcactgacatctgccaaattatgaaaggcatcagctataacagctatactatttataaatattccgatggataattctataacaaacagaataagatttactataagacccataatgctgcttaaaataccgtaattttctctaacttttttattgcttatattgctgtaatctttaatgaattttgaaactatgaatttaacaagcactttatcactccctacatgtataaacattatgataccataattaaaaccatatttattataacatataataatgatgtactggaaaaaaataaatgcattctgtatactataaataaggaaaaatgataataataattttataattggaggtgcgactaatgaaaaatgaacttgagtttgcaaaaaaactaatagattttatatatgatagtccatcaccatttcattcagttgacaatattaaaaatacactgatagagaatggttttgcagagattaaggaagaaaataaatgggaacttaataaaaatggtaagtattttgtaaagagaaatgattcggctctaatagcatttactgttgggtctggctttgttgcaaaaaaagggtttaaaataataggaggacatacagattcacccacgtttaggataaaacctaatcctgaaatggtttctgaaaattcatatataaagctcaatacagaggtatatggaggaccaatattaagcacatggtttgatagacccctttctatagcaggaagagttacagtaagaggaaaaagtgctttatttccggaaacaaaactattgaatataaagagacctatacttgttattcctaatttagctatacatatgaatagagatgtaaacagcgggtttaaaattaatccacaagttgatactctacctattataggaattataaatgataaatttgaaaaagaaaattatcttatgaaaattattgcaagtgaacttggagaagatattgagaacataatagatttcgatttgtttttgtatgaatatgataagggatgtattatgggaataaataatgaatttatatctagcagcagattagatgatatggagatggttcacgcaggattaaatgctttagttaatgctaagtgttcagaagctaccaacgttttggcttgctttgataatgaagagataggaagtgctacaaagcagggagcagattcacagtttttgtcagatatacttgagagaatagttttatcctttggtggagatagagaggatttctttagagcacttcataattcatttatgatatcatcagattcggcacatgcagttcatccaaataaaggagaaaaagcagatccaataacaaggcctcatataaacgaaggtccagttataaagataagtgcggctcaaaagtatacttcagatagcaattcaatagctgtttatgaagaggtatgcaggctctcaggtgttccttaccaaaagtttgtaaacagatcagatgaaagaggtggaagtactataggaccaataacagctacccatacagctataagaacagtagatataggaacaccacttctagctatgcattcaataagagagttgtgcggtacattagatcatatgtatgtagagaagtcttttgaagagttttataatttataagcaattaatattgtatatttagtttttgtgtgatacaattaaaaaaaataatgtaggaataactgttacattttgttttatataagatttcaggattatacttataacggaaatactttataaatcacaatgttaatattccattgcattatatatattaataaccttttgtagaggtgctttaagtcaagagtaaccgtttggagttggcaaacttagatgaacggtaaaaggggcttttagccgaagcatttagattggcagatttatttgctggcttttcatacaacatatgaatggctgtcactttattagttagttattaggtaagtggagcgctacaaggtacacaagattgcatttattagcggcaagggtgttcctttgccgcttatttttataaagaatattgtggcgcaaaaaaagataaagaggtgtttaaagtgaaactatttggcagcatgcatgaagagaacaacgaattatatataggggggataagctcaaaagagctcgcaaagaagtatggaactcctctttatgtaatagacgagaagctagttagacaaaattgtaaagaatattatgagaatttcaaggttaaggagaaaaaaaatagagttgcgtatgcgggaaaggcatttttaccaattgcaatgtgtcaaatcataaaagaagaagggcttagcttagatgtagtttcagggggagagctttatactgcttataaggcaggctttaacatggaaaatgtactcttccatggaaacaacaagaccatagatgagatggaaatgggggtaagattaaatgttggaaggtttgtagcggacaatttctatgagatagaaaaagtaaatgaaatagctaaaaagatgggtaaagtacagaaggtatttttaagaataacaccaggaatagaagcacacacccatgaatatataaaaactggacaaattgattcaaagtttggtttcacgctaagtaatggggatgcccttaaagctgtaaaagaagttttgaattttcaaaatgttgagttatctgggctgcactgccatataggatctcagatttttgatatagcgccttatttagaagaaacaagagttatgctggcatttataaaggaaatacagaaagaaacaaattatgaaataaaggagcttgatttgggaggtggctttggcatttactacacagaagtagataagccgagaggtgctgaggaattctgtagtgcaatactaaaagaagcagaggaaagctcaaaaaaactaggggtaaagttgcctaaactaataatagaacctggaagatcaataataggaaatgctggatcaactctttatactgtaggttctataaaggaaatacagcatatgagaaaatatgtatctgtggacggtggaatgactgataatataagaccttctctttataatgctgaatatgagtgtgaaattgcaaacaaatttaatgcttctaaggaaaaggtaacaatatcaggtaagtgctgtgagtcaggagatatactaataaatgatgtaaatatatcagaagtagaaagcggagatattttagttgtatctactacaggggcgtatggatactctatgtctaataattataataaaattcctaaagcagcagtagttttagtatcggatggtaaggaaagattaatatgtaaaagagaaacctacgagcatatgctttcaaatgaaattatgatttaaattaaagatattaattaaggtttatagcatgaaataaaaattcacatagtgaatataaataagctggggggcttaaatatagaattaagtttgctctctataaattggggcatagggatcaaacttttgttgaagtacagaaatcggttagtcataaaatataggaaaatagaggggtaaactattttcctataggtgacaaccgattttttatttttataataataaactaaaaattttgtctattactttctgattaaaaaaaaatatataggggaataataatcgaagttaggtaatgagtatatttgctgaaaggattgattattatgctttatgtatatatttttcttctatgtctaattatttttcttatatacatattgagagatataaatagaaagaaaagttacaatcataatggaaagataaatttgcatgaggattttcacaatgattatttagatgctataaaaaaatataatagtatgcctaaaagaaaaagcagaagtgtacttataaaaaaactagataggagttataagggacttctaaggggatatgaatattttgatagagaaataagaaataagaaagagatagttccagcagcggaatggcttcttgataatttatatctcatagagaaagagtataaagatataaaacataatatgcctgaaatttgttacaaaaaattgcctattgtaattgaaggagcttttagggggcttccaagagcatattatcttggaatgaaaatagtaaacaagttggacggaaaaataagcgaggatactgttgtttcgtatgtacatgaatatcaaaaaaagtcgatactaacaagttctgagatttgggcacttccacttatgtttagaatggcagttattcagaatataggtagaattactgagagcatggtatttgctcagaatgaaaaggcaaaagctgataaacttggatacgaaataataaattctggaaacgcaaactctgagaaaataaggaaactgcttaaagatgaaggaataatgacatcacattttattgaaagatttattaaaattttaagagataatggtgttgataataaggaggtttatgattatatagatagaaagcttgaaatgcaggaaacaacaactagcgaaatggtagtattagagcatcaaaggcaggctgaatttcaagtattaatgggaaattgtataaatgctataagagagattgaggctttaaattggaagcaatgttttgaaaaattgagtattgtagagagtatacttaaagatgatccatccaatatctataaaagtatggatttttcatctaaagattactatagacacaatatagagaaaatttctagaagaatgaagattccagaatcttttgtagctagggccgctgtaaggtgtgcacgtgaagatgattctgaaagtgatataaaaaagcacgttgggtattacataatagatgaaggaattgatagattaaaaaataaaataggaatacgtgaaaaaggaataagtagaataatgtcaactttaaataaccataaagttggagtttatatatggataaatatacttggaactattgctttatcactctttttactttacctcatttttagaggaacaaatgagtatagaaactggatttatgtattgggctttttagcaattttgattccttgttcagagatggttaattctgtacttaattggagtgttaatcatttaacaactccgaagtttgtatgtaagattgaattacctaaaggtatacctgattatgcaaaaacaattgttgtaattccagctattataaatagtgctagaaaggccaaaaatttaattgaaaatctagaagtttattatttggctaataaagaaaaaaatctttattttgctcttttgggcgattttagagacagtaatatcaagacagaagaatctgattataagataaataaagttgctttaagggcggtaaaggatttaaacaaaaaatattgtcaaaatgaaagggaaattttcttttttcttaatagagagagaaagcttaataccagtgaaggtaagtggattggttgggagagaaaaagaggaaaactcatggaattcaattcacttttaagaggagataaaaatacaagttataacgtgataagtggaagtttaaaggagttgtatgatgcgaaatacataataacacttgatgaagatactaggatgccaagagatacagctaaaaagcttataggagccatgatacatgttctcaatatacctgtaataaaagaaaataaagtcataagaggatatggagttatgcagcctagagtaaatataaattctattagtgcaaataaaaccatttactctaaagttttttcaggagaagcaggtattgacacatatagtactgctgtctcggatgtgtaccaagatttgtttggcgagggtatctttgcaggaaagggaatatacaatatagatgtatttcaaactatgcttaagaatcaaataccggaaaatagagttttaagccatgatttgctagagggagcttatacaagatcagcattagttacagatgttgagtttattgatggctatcctgcttattatacttcaagtagtaagagattacataggtgggttagaggagattggcaattagtaagatggatatttcaaaaatcacctatagatacactttctaagtggaaaatttttgataacttacgaagaagtcttatagctccagctataattatactgatattgttatcaataactttgcttccgtatagttctgataaatggcttgctgtagcatttttatcattaatatttccatggctttttgacgtttcagaagttgctatatcacctatacgaggtatgaatttatctggaaaacttgttggaagtaaaattgtaattgagcagatgtttttgatatttagttttctaccatacaaagcttgcctgatggttgatgctatagcaagaacaatatatagattaacaataagtaaaaaaaatctacttcaatggcagacatcagctgactcagaaaatttatctaagaaaagcttaaataactatataaatactatgtggataggaagcttaatagcggttataattggcattacatccttttacaaaaatgttacaattgggttaataatgtttccgctaagtatactatggtttataagtccatttactgcatattttatcagtaaggaaagtgaaggtactcaaaatataagtacgtcagatgtagaatttttaaggttaactgctagaaaaacttatgcttattttgaggattttgttaatgaagagggcaatttccttgcaccagataattatcaagaatatgaagataagggagttgcgtttagaacatctccaacaaatatgggaatgggattaacttcaaacttagtagcttatgatttgggatttatcggaatattggagttctgtgaaagaatggataagatattgggcagtatggagtctcttgaaatgtataaaggacatttttataattggtacgatataaaaactaaagaaccattgagaccaaggtatatatccactgttgatagtggaaatttaatagcatatttatggcttatagatagaacaattgacgagttcatagcatctcctatctttaattttaacttgaaaaaaggtctaattgatactatgaatttagcggatgaggaaataaaaaatacatcaattcaaatagatggatattatgaggatttgaaaggtcaattaagggatgaagaattcagtttaaacgggttctacataatattttctagggttctagaaaaagaagcatatgtagaaggaaatgtaaattctgaaaagttgtattggaatgttaagctcaagaatagtgttattagactgaaagctggatttgataagttaatgccttggatagatggtgttagtcaaggcgaagaatatattttcggtgatttaaaagaagctactttaagagtacctcttagaaaattacctgaaaaattggaaaggataaaagatgctgtagaacataggaagagtaatactgtagatgaaaatagagaaaactatggaaagatgataaatttactgggtacagctaaaagagaaattgaagaaattattaaaaaattaacagatataaaaaatagggtaaataaaatggctgaaaatgctgattttaaaatgctttttgataaaaggcgtgatttattttcaatagggtatgatattgaaagtgatagtttgggaaaaagttattatgatctcttagcatctgaggcaagacaggcaagttttatagcaattgcaaggggagaaataaatcaaaatcattggtttaaactaggaagatcaataactaatgtggaaaaagaaaagtgtcttgtatcttggagtggaactatgtttgaatatcttatgcctattataataatgaaaaactatccagatacgcttttaagtgaaacatatagatcagttgttgaaagtcaaaaaaaatattgtagaaaaagaaaaattccatgttggggaatttcagaatcagcatattcagaagtagataataaaaataattatatgtataaggcctttggagttccaggaataggacttaaaagaggactttcagatgagtttgtagtatcgccttattcatctgtaatggcacttcaggttgatgttaaaggtgcaataagtaatatgaaaaatcttttaaaagaaggcgctgggggaagatatggattttatgaagctattgattacactaaagaaaggctaagaggaggaaaggataaggctatagtaaagtgttttatggttcaccatgaaggaatgagtttgatgtctctagataatgttataaacgataagatacttcaaaaaaggtttcatagcattccaagggttaaatcagctgagcttcttctacaagaaagagtgccaaagaggattatatacaatgaagagagggcatttgagattccagaacttaaggaacaaaggcagaaaatagtagagagaaagtattcaacagctaaaactaaatttccagaagttcagattttatcaaatggtacctattctgccatggtttcaaatagtgggagtggttacagtaagcgcgataaagaatatatatacagatggagaaaagactccatagaagaaagctatggaatgttcttctatataagggatttaaacaataacaaatggtggagtgctggatatgagccttgtcaggatgaaggtgataattatgaagtcactttttctattgataaggcaaagattaagagggaagatgaaggcttaattacaagtactacaataactgtttcaaatgaagaggatgcagaaataagaaagatgtctataagaaatagaagtaatacaactaaacttttagaaataacaagttacatggaggttacagcggctccttttgatgcagatttagttcatcctaccttcagtaatttatttgtaagaacagagtttgaaccacaatatggatgtttgattgcttcacgaagaagaagaagtgaaaaagaaaataaaagctatgttatgcactcgatgtttacggatggagacgtaaatggaaatattcaatatgaaactagtagaattaactttataggaagaggaagagatgttcataatccagaagctttaaattctccgcttaagaatacaattggagatgtgttagaccctgttatgagtcttagaagaagaataaaattgcagccaggaaaaacaataaatatttcatatataactgcaatctcatcgtcaagagaagaggttttagagattgcaaaaaaatattcttctcaaagtagtataagaagagcatttgagattacaaccacagaagtaaaaatgtggatgaagtatttaaatatgatgtcctcagaagcaaatttgtatgaaatgatggcatctaaaatattatatctaagtgaaaaccttaatatgagatcagattatataaaaaatataaagaaatctcaaccagcgctttggggatatggtatttcaggtgatgttccaataatgctcttaattgtaagaaatgatggagatattggttttgtaaggcaaatggtaagagcgcatgagtactttgaaattaaaggattaaatgtcgatttagtaatactgaatctcatggaaaattcctacatccaagcattccaggatacaataaatagttttataaatcaaaatatagttagaacgaaaaaggataggataggaaaaatatttgcattcaataaatcattaatgccaatagaggatatggaattgctaattggtatttcaaaacttgtaattgattctgataaaggtctaatagtaagtcagcttaaagttcaaggtaaggagtataaggaaattgaagatattaaagttcatgaagttcattataatataaaagattataagttcaaaattaattcacttaggttttttaatgattatggtggatttgatgaggctaacaatcaatatgtaattattctaaatgacaataagaatactccagcaccttggataaatgttgtgtctaatgagaaatttggttttcatgtatctgaaagaggatcagcgtatacttggtgtgcaaatagtagagagaataagataaccccttggaacaatgatcctgtgtcagatgttttaggagaagcactttatataagggatgaagttacaggaaggtattggagtataagccctgagccagttagagacaatgatgattatataattgaacatggttttggatacagtagttttagccattataaagaaggaataataggtaaaatgacaatgtttgttcctatgtatgataatgttaagcttataattgtaaagcttaaaaataatactgaggttgataggaacctggctttagcctattatgcaagaatggttttaggtgtagtggcagaacatactgaacaatatatttctacagatatagatttgaaaaataaaataatttactcaagaaatccctacagcacaagctttggtagcttaaatgcttttcttaaaatatatgggggagaagacgaaagtttcacaggtagtagaagagaatttatcggaagaggaaataatcttcacataccacaggcaatgaaaaaggctaggttatcaaatacagctggaagtggaatagaaccgtgcatggctgaaaaagtaaaaattactttaaaaccaaatgaggaaaaggaaatagtaataatgttaggtgaagaaacttcactagcacaaattaagagtgtaacagatagatattcttctattgaaaattcagaaagagagcttacaaatacaaaagaatattggaaatctattttgaatactgttgttgtaaacacgcccgatgagagtatgaatataataatgaatggatggcttatgtatcagcttatatcctgtagattatggtctagaactgctttttatcagtctggaggagcttatggtttcagagatcagcttcaagatactatgccacttacctttgttagaccagatatgacaagaaagcaaattcttatcagtgcatcaagacagtttgtagaaggagatgttcagcattggtggcatccagttgtggatagtggtataagaactagattttcggatgatttattatggcttccttacgtaactatagattatataaagggaactggtgatttaagcatcttagatgaagttgttccttatatagaggatgaaccactaaaagagggtgaagatgagagatatagtcttacaaaagtttcagataagacaggaacgatatatgaacactgtataaaggcaatagataaggctcttaaatttggaattcacaatatacctcttatgggaagtggtgactggaatgacggaatgaacactgtaggtaataaaggaaaaggtgaaagtgtatggcttggatggtttttatattccattcttcaaaattttaaagatatagcaaaattgaagaatgacgattacagaagcggaaggtatttagaattaagtgattttatacgagaaagtatagataaaaatgcatgggatggaaattggtataggagagcttattttgatgacggtactcctcttggttcagcacagaatgatgaatgccagatagattcgttgtcacagtcctgggcacttatatcaggtggaggtaaaactgatagagctaaggtagcaatgcagtcaattgaaaagtatcttgtaaaggaagacagaggaatgatattacttctaacacctccttttgatgattctaagttaaatccaggatatataaaagggtatgtaccaggagttagagagaatggaggtcaatacactcatgcagctacttgggtaatacttgctatgacaaagttgggtgaaggtaaaaaggcatggaaattatttaatatgataaatcctataaatcattcaagatctttctatgattgtcaaacctataaggttgaaccttatgtaatggcagcggatgtttatgcaaaagaaccccatgttggaagaggtggttggacttggtacacaggtactgctggttggatgtatagggttggacttgagggtatacttggattaaaactaaaagaaggtaaaggttttacaattgaaccatgtgttccaaacaaatggtattcctatagcatgcaatatagacataagaacagtgtatatcatatagatgttagaagaggagataaaagagaaattttactagatggtaaagtaatggaagatagaataattccgtttttggaggacggtgatcataaggttgatgttattatagagaagaatatatagaagttaaaattgcgaagctctcaagacaagagcttcgcaattttaactttactttggacttagcttatttattaagaatttaaagttatcttctgctaataactcttttttattagtatctaaaatcttctcatcgtaggtgtttatgttcttttcaaaattatctagggctgaatttatagcctccttaaaaagtggaatcaaacttattattttgcttagcttatctacataggtatcatcgtaaagcctaaagcaatgaaatgagtctgaggtcaacctaccatcatcaaatatgtaaatatatcgagcgttttcttcaggtaaatttaattctattttatgtttgtataacctaaacgaagaagaggatttttttacgtatacagggaatattatagaaaaaagtgaagatattttattttcttcttctactaatcctgtaaaatcattttcgtaaagttttgttataatttcatcagtgaaaattgaattcttaattgccttgcctagtttgactctaaggttttgttctctttcgccagcaaacaaattgtctatagaactaaacaatttattaattggattctttttattattcataaataatctcctttttacttagtaagcattaaaaataaatgccatataagaggagctaaaaatacggtgataattcctgaaagtgccatagttaaactactcattgctccttctgtttcacctatttccatagcctttgcagttccaactgcatgagagcatgctcccatagctatacccatagctactttatctttaaactttaacagtttatatagaaatggtcctacaatagttccaagaattccagttattataattgaaacaacagtaatagcaggtatgccaccaagctgtcttgatagctccattcctattggtgttgttatggactttggaagcagtgattctgttaaagcatcagaaaagttaaataatcttgaaaataaaattatataaataattccggaagcagcgccgcataaaattccaatgattattggtaaagcattctttttgaataacgaaaacttcttataaaatggcaaagcaagagctactgtagctggtgataaaaagaaggaaattagctgtccacctttattataatcagtatattttatattaaactttagtaaaaaagatattaatataataatagagattaaaagtggattaaaaattgaaagctttgttttttcctttaaaaattctcctattaagtaagctaccaaagaaattagtacaccgaatactggagaagtaactaaactattcacgggtaagcaccttccttaaaaaatttactacgtaagctgtcacaatccagactaagattgtagagataatcactatagtcattaatttgagccactttcctttaagtattccaaaggatgtcataagacccactccggcaggaacgaagaaaaatgacatatgtgatatcaaaacatcgcatatatcttcaatcatttctacttttattatttttgtatagagtgcaagaaataataaaatgagtcctaaaacagttccggggataggaaggttgaatactagttggattattacaccaagaaagtacgcacttaaaataatcattaactgctttaagtatttcaaaatatcgcctcttttgtttatggattttatacaacttcataaatatatcacattcttttgtagagaacaataatataaaaaagcatgtaatcgttacaaaaaaataataacgattacatgttttggtgttttagttataaaattttaattagagataattgaatatatttcaagatgagaagatgtaattatgttaaattatatgcaatatttacctgtttagattcaaagaggtttcagttgatttcatatcagttttatattgttcttgcatattatagggatggtaataaccgtttgtcatcatgtagttcaatattttttcgtggcagtttataccttcatcaagatgtttccttaaaatagctcttactctaggtgtagctgtttcagttatagctacagcatagttttttactccagacttagttgaaattaagaagtctgttgccacgacgtgatcattaagcacatccattcccgttatactttctaaaacactattcatagtaggacctcctttttaattattgatgcataacaccttctggagaacacatatccgaatcctttataagttctttaagttctcctatttgtctttttgttgtactgatgtcatcttgtaaaattgactttaggttgggatcagaaactaatccggtcatgacagttgtttttgttaaacacaaatttttgaatgttaaaagctcatgtaattccattgtttcatgtactccgagtttaggttgttgcataaatatcacctccatcatttacttcaagtttatattttgcatatattatataaaatatgcaaagaatttgatataataagatacattttataacttaaaaaaggggatgaagaaattataaaagaggatattacaagtaaagaaagaaaaaaattaataaaagcgcagcagggagagttagatgctgtaatagtatataaaaaactatcatctatactaaaggaagaagagtataaaaaaacatttttgagcattgctgctgacgaaggaaaacatgcagcaatactcaaaaagtataccgaagaaaaattgatacctaaaaaattaaaggctaattttgtgtatatcatttatagcatctttggacttaaatttactcttggtattttagaaaaaggtgaatttaaggctgctgaagcatatttacctcttcaggataaatttaaggctattaaagagatacttgatgatgaaaaaagacatggggaacttatgaataatatgaaaaagtagtattattatgtaatataagaataaggttctaggaaaagttaagctatacttaattaattcttgaaaatagcatatcaatcatttaaaattgtagagtattaaacaattttaaattatacaatttaaggagttaattatgaaagaagcactaaagaagtacaatttaccaatagtatttgttataacatacgtgtttggatgcgtatttgcaatgctttgtcaaaacactgctggagaagtaattatgaatctacttatttttgctcttatagtattagttatttatgcaattatatttaattatgtaatgtattcaaaaatgagttttggtcaaaattttttgtatatcttgttttcaagcattatatatatttttggcttgatttttgtaatgattttatcagctgttataggagatagtatcaataattccaacgatgatttcggtttcttgcttatgatgtttggtacaagttttacaatgggaattttctttgcatatttaatacctatagttcccagcgctatagtaaagcttttgtgtggacatgaaaaaaagtaataatgaaagttgaaattaattttttagattaaaagtaatatttaatgaaatataccattggagtatgctataatttattagtaaaaatcgttagttatagctaatgcctttaaaaagctaatataactaacttttaataatgtttgataagtattttcagcatatatttataagtgctatagtgtatttttataaatatattaatagttttataataatgaatgaggtatttatatggaaaagtactttaataagttagacgagattgaagaaaaagaagagtttaatgaatatgattttgaagttttaaaatatttctcgagaaattctaatagtgatgtaagatgtagagtagctgaaattttattttctaaggttaataaagagggagaagaaatattaattaatttgatagatgataagaatgaattagtaagaataaatgcttgtgattcactttgtagcagtaattcacaaaagattcttcagcttttaaagagtaaggttttagaggataaaagctatttggtaagaggctatgcattagtatccatatcagagattgcagtcagaataaaccacgatataagagaatttcttatatgtgcacttgaaaaagaagaggttaagtgggtaaaaattaacttttataaggctttgtatatggtaggagagactacatatttaaagctacttatagaggaactaaataacgaataccacggaattaggtgcgcggttgtaaatatattaaccgaaataatttctcgagaaaatcttgaagttataatgaaagctttaaagaaaaggcttaaggttgaagaggtaatgtcagttaaaacggaaatagaggattttatagccttagagcctgtagtattggaacacaaaagaacgtcaatgaagacactatagtatattcattggcgtttttacaattcattaaaatcttttttgtagtctcttttcaaaaatggctacagctacatacattaggtaagctagaattgagagtattattatactcatcattaccatgtctagttcagaaatttgtccgccataaacaattaagaaaccaaggccttcttttgctaccaggaattctcccattattacaccaacccaagataaaccaacgtttatttttaatgctgacattaaagttgggattgaagaaggaattattaaatgttttagaatctgaaatttatttgcaccaaaggttttcataagctttattttttcatcttcaacttctttaaaactatttaatacagttattatggttacaacgattgatattaaaactgtaattactattattgcttttattccatttcccatccagaagattattattggagctaaggcaatcttaggaagagagtttagtacaactagataaggatctaaaacttttgaggcaaaatccgaccaccatagaagtattgctatgaaggtacctaaaatagtacttaaaagaaagccaactacagtttcaaaacaagttatacctatgtgtgtaaataaagctccttctccataaattttaattagactttggagcattcttgaaggagtgcttgttaaaaaaggatctattatatttaaatcaccggctatttcccaaagaacaaatatagaaatcagtataagaattcgtgttagagtaattttatgcttctctcgttttaattttttaatgtagttttgatgttcaacgctaaccttcattgatatccatctccttccaaacatcattaaaatacagtgaaaaatcaggacactcacgtcttttaataggagatacatcaggaagagttatttttacatctttctttagtgtcgctggacgcttggaaagcacaattactcttttagaaatagagactgcttcggctatgtcatgagttaccattatagcagttttgcactcagtttttataatttcacatatttcgcttccaacgtttagcctggtttgataatctaaagctgaaaaaggttcgtctaaaaggagtacttcaggatcaagtacaagagttcttatgagagcaactctttgtcgcattcctccagataattcatttggatgatgatctttaaaatccttaagatcatacttttctaaaagttcttcaatcttctgttttgttttatcatttaattctttctttattttaagacctagagcaacattatcccatacacttagccattgaaatagattatccttttgaaacatgtaacctatcttaggagatactccctttactaatatattgtcgataaaaacttctcccgaagaaggctttaaaagtccagcaattatatttaaaagagtagattttccgcagccggagggccctacaatgcttacaaaatcaccatctggtactttgaaacttatattctttagtgcttttgtctctgctgaaactgagtgataattaacagatacattttttatatataccttatccattttatcatctccataaaacttactttatatttttaatggcttctttagcaaatttctcatttgttatagtgttaaaggcaggtctagttttaatgagatctttgtcataagactgaattatatccataaatctattcatttcttcttctttaagaagtggatttgatgcataagcatctatacttttatagttttttatagagttttgtattaaagttgtgctgcttccaggaaaaaatgattttattagtgatgctgtttctttatcagagtgtttactcatccaaagctgtcctttgtaaatggcattagtaaaaccctgtattacttttgggtttttgtttatataagatttggtagtgaagaaacaggtatatggaagatatccagcagcagttccaacagatgcatttatatatccagctttactttgttctaaaaggcttcctgtaggttcaaataaggttgcataatcaccagtaccccctttaaaggctccaccgacagaagaaaagtttatattagttattatatttacgtccttgcctggctttaaaccattgcttttaagtgcatactcaaaagccatttcaggtactcctccaggtctaccgcctattactgttttaccctttagatttttccaagtaaaagatttattttcatgtctgcctacaagaaatgaaccatccttttgtgtaagcttagcaaaaactatagggtaatcttttctatgtttgttgtaaatatatataacctgttcaggaccacaaaaacctatgtcagcacttttacttaaaacctgctgcatagtcttatcggcaccttcaccagtagaaaggtcaagatttattccgttttctttgaagtatccgttttttatggcaacatacattggggcatagaaaatagagcgagtaacctcatttagtcttacagtagttaatgaactattagttggttttgaacaacctgtaaaggtaatgcataataataaagtaaacaatgttaatagtttaaaataagctttcttcatgaatcctcctttaattttattacaatgcttactttatattatgaatttgaattaggataagttattaaattttatactatataaagagacttgttgaaagtatttttgaataagccagaggaattttgagcttcacttataaggaaatctgatggctctttagaataggtttttattataacaacagcatcgtcgactatacactttaaatcgtatattgaaccggatagatccttatcaagattttcagcaattcttaaaagtatccctataacttttattgcgtaaatgtcttctttttcaagcatattaccgtattcatttaacatagattgtatgttttcacttctttggtatatgtcaatgcatgcgctcattacgcattctttatgggaaataccgtataaggaggaatttagtattatgtatgcggaatgcctgtgatgataatagtaagatatatttactccagcattatgaaacattgatgctgtttttatgactttatcaagtgatatattaattttgtgcacagactgtaatgatgaaaacagtagacttgtgagtttgtaaacgtgaaagctgtgggtaatatttatactgttgttgataagtacattgtttatggaaaagtctagtatattatctattggttttttatgaaataattttgatagtaaaagaccttctctcaagccatttctgcaaattataatttcatttatgcttaaaatatttactagcatagatactgctaaggaggcgcctacaaagatatcagctctgtcctttgatagtccctttattttttttctctgctcaagtgttttattttttacatcattatatatgtcctctgcagattttgcaggcataatgtaattgtgtattaaattaagaggataatctttttgtttctttgatatttttcctatgtttcggatacttcctcctatacctattaaagtagttgaggaaatactttttagccatggaatgctggaaaagctttctagtaaaaaatcttttagcattttctcttgcttctcatctatagaatctttaatattaaacttttcaattaaagttatggcaccaaattgaagactcacgcattcttttaaagttctgtttgctactaatataagttctgtacttgaaccaccaatatccattataaggccatcctttatatctaaggtatttattgcggcaaaataatcataataagcttcttcttctcctgaaaggactcttatatttaaatttaggttattctttacagtttgtataatagactcttgatttttagctctcctaaaagcttctgtagcagttacaaccatttctgtatcttcaaacctattgcaaaaatttttatacaaatttagaacacttattaaagagtctattttgttatcagtaatatttcctttagaatcaaaaccagagcctagtcttacatattctttaaattcagttagtattttaaaggaacttttacttgttatttctgcaaacagaagtcttacagaatttgagcctacatcaattattccaatatgcttcaatatcatcacctcgaaaaatttttgataaatatagcatagtattaataaatcaattctatacgtttataatattgttttctagttatactaaactatgaagaattctaaggttagatgggggttgatacttttggaaaccgtttggaagtaggagctttataaatagagaacttagctgatagaaatttaatagaagagttttggaggaggcggaagaataaaactaatccacttcttgagagatttagatttttatctatagcaagttctaatttagatgaattttttatggtaagggtagcgtctatagttgaccagataagtgctggtattactataccggatattgccggatatacacctcttaagaagcttcaattgataagagaaaaggttcactttatggtatatgaagagtacttgtgttttaaggaacttatttgtgacttaaaaaaacaagaaattacccttataaaccctaaagaattaagtgatacacagaaaaagtacataactaattattactacaatacaatttttccagtaattactcctatagtagtcgataaaagtaggccttttcctctcatattaaataaaagtcttaatattgcacttttaatagagggtgataatgattcagttatatttggtacagttcaggttccctctgtaataggtaggcttgtaaagcttcctatgggaaataagtttattcttttagaggatgtaataaagatgttttctaaagaattatttaatggtcataaaattttaaacatgagctgttacagaataactagaaatgctgatttggcaatagatgaagagggtgcagaagatttacttgagactatagaacagtctataaggagaagaaaatggggagaagttataagaatagaagtggaaaagaatatagatataaagcttttaaatatattgagaacagaggtagaggcagatgaagctgatgtatataagatagatggtgctatagatttgacctttctaaataaaattgcagctattaagggatatgaatgtttacgatacccaaaatttgaagcccaagtagtaccggagtttaatataaaagataagagtatgtttgaagtaataagggaaaaagatgtgcttttgtatcatccgtaccaatcctttcaacacgtagttgattttgtgaaaaaagcagcttctgatcctaatgttctagcaataaaacaaacactttatagagtgagtggtaaatcacctattgtagaggctttaatggaagctgctgaaaatggaaaagaagtaacggttttagtagagttaaaagcaagatttgatgaagaaaataatatagtttgggcaaaaagacttgaaaagtcaggatgtcatgtcatatatggacttgtaggattaaaaactcatggaaaactgcttattgtagtcagaaaagaagtaggtagaattaaaagttatgttcatatggccacagggaactataatgatgtaacggctaatttttatactgatttagggttatttacttcaaatgatatgattgcaaaagatgcttcttcaattttcaatatgctgtctggatatgctaagataagcagtatgaacaagctttttgtagcacctcttaatatgaggagtaaatttatagatttgataaacgaacaaattaagagtgcaaaggaagggaagaatgcaagaattatagttaagataaatgctcttgtagatagagagttaataacaaagctttatgaggcatcttttgcgggtgttgtaatagatttaattgtaagaggaatatgctgtttaagacctaattatggtgagataagtaggaatataaatgttataagtatagttggaagatttttagagcacagcagaatattttatttttataatggggaagaagaaaaagtatatctttcaagtgctgattggatgacaagaaatctggatagaagagttgaaatactgtttccagttgaagataaaaaaaataaatttatgataaaagaacagcttaagacgtaccttatggataatgtaaaggcaagaagattgagaagtgatggttcttatgaaagaatagaggatagtcatgatactttaaattctcaaaaatattttcaagaaaaggcaaaaaagattgctgtaaggagtagtgtcagaaagaaaataatagattttcatagatagcaggtttaaattaaaatgggattgcattaagcaatcccatctttggttttcaaagcaactagtttactaaatagttgctttgagttgatgttttgaaagagatataaatttagttttggtataggagtttgcgagctactttaatcagttaaggtatttagatgttttaaaaacgtcgtcatctccattgtaggtataatcaaactcccatgtagctatgttgttgcttactatggggtctactacaggatcaggcattggtgtatagtcatattcggaatatgaccttatatctttaggcctctgttcaaagtagttcctcatatgaggagcataagtttttttgtcatccaaaattaactcctcctcacatagttttattgatatatggaacatttatattatgcctaatataaataatttaattcatatattgaataaattttactctttctttttatattatttaatattttattttattaaactctattttcaatttaataaaataatggtaaaaaaacaaaaaattaaaagttactattgtaaacatgcgtttatatagtatataataaaaaaaacatactatttttaaaaaaatgataattaaaagggggaaaaattaatgaatagttatgtaaaaaggatgttaacgataagcacagcagtgtttataactatgggcagctttgcaagcattgtccacgcagagcctcagggggatgttggtgttacagagggagtaggcgatactatagccaataaagcttcgtttttaggggatttagatccaaatactcaggtaacaattgatattgtaataaagcttcaaaacaaatctgaacttcaacaatatattaatgatacagttacacctaaaagttctaattatagaagatatttaagtgtagctgagtttaaaaagtcatttgctccaaaatcgaaacaaatcaatgaattgactgaatatttaaaagcttttggcattaaaagtgaagtatatcaagataatttaattgttacggctaccggaacagcagatcaaataaataaagcgtttaatgttgaacttaagcatgcgtcatataagggaaaaaactttcatgccagtaaaaagcagcctaaacttcctaaaaaaattgctgataacattttatgtattttaggtttaagtagttattcaagctatacaacgaaaactgtaaaggttccaaatgaatttaagccttcaaacagtaatggacctctttctcttaatccttcagatttaattaagcattataatgtacaacctttatataaaaatggtgcaagtggtaagaatgaaagcataggtattgttaccttagctgaatttaatccaaatgatgcatattcgttttggaaacaagaaggtattaaaactgacaaaaggcgtataaaagtcattaatgttgatggtggttccggtaatgatggggcagacgaaacaacacttgatgtagagcaatcaggtgcattagctccaaaggctgaagttaatgtatatgttgccccaaatactgatccgggttttgtggatgcctttgctaatgtaattaatgaaaataaatgtcatcagatatctgcaagttggggagagagtgaagacctcatttcatatttagtatcacaaggtcaagaaaccaaggggtatgcagaagcatttaatcaattatttatgcaggctgcagcgcaaggtatttctatgtttgcagctgctggagattctggggcctatgattcaaaagaaaatacaccaccatcatatgaactttctgtagataatccagctgatagtccatatattacagcggcaggtggtactacattagcatggcagggaactgtaaaagagacatcagttaaggtagataaagaacgtgcatggggatgggattatttatatccggcatttgacgctgatggattgtattcgagtggaaaattagataaatattttgttggtggaggtggaggattcagtaagatttttgatactcctgattaccaaaaaggtatttctggtgtaaatagatttacaggagttaagcagtggacagcttcaaatccccaaggtcctcttcttttgaatgtaactagggatgctgctcaacagatagttactggtaaagatactggaagaaatgtaccggatatttcgatggatgcagatccatacacgggttataatgtgtatatgaacggtgaaatgagttctattggtgggacaagcatagtagctccacagttggcaggattatgtgcattgataaatgataataacaatacgcaagttggtttttggaatccacaaatatacaaatttgctcaaagctcaaattcacctttaaatcctcttaacgatactggttctagcaatgataatattttctatacagccacaaaaggtacaatatataatcaagcaactggtttaggtatacctgatattgcaaaattaaatgcaagttttggaagataaggacatgccattagagaatattattgcagtatttaggcaaaactataactaattaaaacatgttgacaaatttaaatataaatattatcattgtataataaatgacataataaaatcgatgagaagaagagtaaatttaaaaacaaaattaaagagaactgtgaattggtgaaagtgcagtatttatgattaaattgaatgggtctttgagatttgaagtgaaagtatataatttatattattaatttcaaacgtaaaccgcgttaaggaagaaaagattacattattttgaggggagttatgctcctgaaaataggtggtaccgcgtgaaatatacacgccctatagaatttttggttctttagggcgtttttattttgtagatttaaattttgttaggaggaaattttattatgggtgaaaataaaaaggtcatatttagtgggattcaaccatcaggtgaacttactataggaaattattttggagcaattaaaaactgggttaaacttcaggatgaatatgattgttattattgcatagtcgatttacatgctataacagtaaagcaggaagcaaaagatttaagaagaagaacacttcagcttattgcaacatatattgcatcagggatagatcctgagaagaatacaatttttatacaatcacatgttccggcacatgttcaagcacaatggattcttaattgtatgtcgtatgttggagaactttcaagaatgactcaattcaaggataaatctaagaaatatgaggatacaggtattggagcaggacttttaaattatccagttttaatggcagcagatatacttatttatcaagcggacttagttccagttggaaaggatcaaactcagcatattgagcttactcgtgatttggctcagagatttaattcaacttacagtgagacttttaaaataccagaaggatatataccaactggtggagcaaaaataatgagtcttcaagaacctctaaagaagatgtcaaagtcctcagataatccaaacagctttattttaataatggatccaccagaagttataaaaagaaagattgcaagagctgtaactgataatgtaggagttgtaaagtatactgacgatcagccaggagtaaaaaatcttatgaatataatgagctgttgcacaggtatgagtgtaaaagatatagaggataaatatgaaggacagggatattctaaattcaaggaagatgttgcagatgcacttattcaagaattagaaccaattcagaataaggtgaatgagcttttgaaggataaagcatatcttcaggacatatgtaaaaaaggagctcaaaaagcgtcctacatagctaataaaactgtatctaaaatgatgagaaaagttggatttatattgccagaaaaatagttttctttggaaaaaatgaagtgtaaatatttataaattttttatagaaattaagtagaattggtgatattattatgagtgtacttatagtgagctaattttgttattcaaatatatgtagtatactgaattggggtgggtggaatgatatctcagaataaattctgtattatcaatgttttgcaaaaaatgctagataaattaagaatgatagaaattaaaagggcagaagaacttgaaatatcggttgtgcaagttcacgctatttttgaaataggaaaattgagagaagtgtctaccaatgaattttctaaaatactatatcttgacaagaacactgtgaataaaatagttaataatcttgtagatgaaaagtttgttttaagacatatacaccctgagaatacaaggcatgtaattctaaaacttacggaaaatggacaaaagatatatgaaaacattcgtgatgattttaaactctattgtaagagaattttagataatttaccagagaagagtagagagagtataacaaaagactttgaaattctattgaaatctatggaagataatgcttagagaataatgttaaaatataagacgaaatgtttatctcattactaattggtaatgtagataagtttttcgtcttatattttttattgacttataatatatatatggggaattatagataaaaagaaggtgattttatgcgtaaaattaatatttttaaaggaaagcataatccacaacgtacagcaatagatttttttaagtatgttggtcctgggcttttagtaactgttggttttatagatcctggaaattgggcatcgaatgtatctgctggatcagactatggatattcgcttttatggatagttactttgtcaactataatgcttataatacttcaacataacgctgctcatcttggaatagttactggtgattgtctttcagaggctgttagcaagaaatttaaaccttggcttacaaatataatactttacagtgctataggagcagcaatatctacagctatggcagaacttcttggaggagcaattgcccttaatatgctctttaggcttcctataaaaattggaactttaattatgttatcgctagttatttggatgcttttttctagctcttataaaaagcttgagaggtggattataggatttgtttcaataataggtttatcatttatatttgagcttttattggtaaaggtaaattggcaagtggcagcagtgagttttgtgtctccaagttttcctaaaaactctatgcctataataatgagtgttttgggagctgttgttatgcctcacaacttatttcttcattcggaaataatacaaagtagacaatggaatgttgaaaaggaagatgttataaaaagacagctcagatacgaatttttggatacaattatatcaatgattgtaggatttgctataaacagtgctatggttttattggcagcatcaactttttttaaaatgcatgttagtgtaagtgaattatctcaagcacaagctttattgaaaccgcttttaggaggttctgcttctgtagtatttgcactggcgcttttattttcaggtatagcttcaacggttacggctggaatggctggaggaagtatttttgctggaatatataaggaaccttatgatatagaagatagtcatactcaaataggtgttattataactatggttttagctgctgtaattatattttttataaaagatccatttaaaggattaatatattcccaaatgattttaagtatacagcttccaataactatatttactcaaatttatcttacatcttctaaaaaagttatgggaaagttctctaattcattattagacagagttttacttggaataatagcagtaatagttacagctttaaatatagctttgttagttagttatttttaaaaagttaaaaggaactttttttaagttccttttaagacagtatatactttattgattaagcataaatttctctataacttttgctacaccgtgagtttcattgttatcagttacatagtcagctgattcttttacataagggaaggcattgcccattgcaacaccaagacctgcatattctatcatagctatatcatttcctgcatcgccaactgctatgagttcctctttctttaggttaaggtgctcagataaaattttgaggccaactcctttatgcactcctttgggtgaaaattcaagaaatatatcagagcttcttgcaaccgagtagtcatcataaatttctttaggaagaagtttttctactttatctagtttttctttagagtctatcatcattatttttacaatgacagtatcatggggcaattcgttaaagtttttttcgattaatggaatctgatttatgttgacttcaacttcagtgtaagggtttttctttggagttatacactcatttatgcttaacatatgtatgtttacattaaatttttggcttaacttatataatctatctaaatcttcaaacttcattaattccttacctaaaacttcacctgtttttgtattctgaactaagccaccattgaaggctatagcgtaatcatcatcattgactaagtccaattccttaagataacgctctacaccttttaaaggtctaccagtagataacacgaccttataacctaagtttttagcttttttaatagcttctttatttcttttagatattattttatcatcgtttaaaagagttccatccatatcaagtgcgattagtttatacattgcaaacctccaattgttaaatttagtttaattatatcattaacagcaaattttatgtatataaaagagaaatatggtcgagcatatagttatatagctaagactttggctagatttcattgtattgaaaaatattatataaactgatataatttatatttgttatgaatatgcctatgtagaggagatataagatgtcagagttggttagtgaaatagaaaaaaggcgtacattcgccataatatcccacccagatgctggaaaaacaacacttactgaaaaacttttattatatggaggagccataagacttgcaggttctgttaaggcaagaaaggcttcaaaacacgcagtttcagactggatggaaatagaaaagcaaagaggaatatctgttacgtcttcagttatgcagtttaattatgaaggctattgtattaatatacttgatacccctggtcaccaggattttagtgaagatacatatagaacactcatggcagctgatagtgctgttatggtaattgatgcagctaaaggtatagaggctcaaactaaaaagctttttcatgtttgtagtcttaggggaatacctatatttacatttgtaaacaagatggatagagaaagtagagatccatttgaacttcttcaagaaatagaaaccgaacttggaataaagtcttatcctataaactggccaataggtgcaggtaaagattttaaaggtgtctatgatagaagaaaaaaagccgtacatgtttttaatggaggaaatcacggtcaaacagaagtagaggatgttgaaggagatgtaaatgacccttcactaggagaattattaggagaagcattgcaagaaaaacttgctgaagatatagaacttttagacatagctggagatgagtttgatatagagaaggttaggcagggagagataacacctgttttctttggaagtgctcttacaaactttggagtaaagccatttcttgaagaatttttaaaacttacaacaccacctactcctagaaattctgataaaggtgaaataaatgtatttgagaatgatttttctgcatttatatttaaaatccaagctaatatgaataaggctcacagagacagaattgcgtttatgagaatatgttctggtaagtttgaaaagggaatggaagtaaaccatgttcaaaaaggtaatactgtgaagcttactcagcctcagcagtttttagctcaagatagagaaataataaatgaggcttatgcaggagatattataggagtttttgatccaggtatttttaacataggagacacactatgcaaaagctctgataaattcaggtttgaaggaattccaatctttgcacctgaacattttgcaagagttagaactgtagatactatgaagagaaagcaatttataaaaggaataacacagatagctcaagaaggtgctattcaggtgtttaaagaagtaaacataggaatagaagaacttatagttggagttgttggtgttcttcaatttgaagtacttcagtacagacttgaaaatgaatacaatgttgatataaaaatggataggttaccatttaagtatataaggtggatagaaaaaggagatgctgaaaatcttacacttacatcagatactaaaattgttaaggatgtaaatgaaagaagtttactcttattccaaagtgaatggtctataagttgggcaatcgagcacaatgaagggcttgttctttcagatataagcaaataaggttaaaaaaataaacctcgtgttttatagggaaatcaatatgaatttaataaatcatcttgatttccctatatttattttttgaataaaaaaacttttatagaaaaatcataaatttgtacctatttaataaataaaagctaccgatataattaattacatgatatattagtattaaaaattaaaggaggagagaatgataaaaaaatatacgctgcacttatatattttattaggagtttatcttatactatattttatttcaacaatttttcaatcaaagttttttggagatattttatcaccaataggaactttaatttccttttttatattaatatacgtgtataaaaaatcagaacgttttaaaggtgtgtggcttactttatccttagggtcactaatatggtcgataactgatatactatgggcaatttgtgaattattaattagaattaatccggaaaatatcactatatttgatttcttttatttaggaactaatatatgtatagtaacagctggatatatatatatgaaaaagtttattaaaggagtaaatttagttcagttctttatagatgtttctgcaatatccataagttgttttattatatttgggcttttatttttgcatggaagttttaatttatttattaaaaatgcaaacaatattatcgaatttatatatattattacagatcttttgattattaattgtattttgtcaggtttgttttcagtgcgtaaaggtaaattaaccaaaggtgtatatattactattttaggtacagcaatatatgcagttgttgatttggtttatgtatatgagtatttttataatttatatgtacctaattctataattgattttatgtatgccacatctcttttaataattgcctttggtggtctaactgttttaaaatacagtaactttgaatgggcagatgagttttactctaaaactaaaaacatcggaagtgaaaaaaaaggactatacttattgttaacaattcctgtatatgtaatatttggagggtttgatttttcaaaaatattagtgctgctctatatttttgtagcttatgagatattaagtaattatgtgcaaaaggccataaataacgaaacacttcttacgtatgaaaaggacataaatttaatattagaagagaaaattaaggaacgtacaaaggagcttttattaaaaaatcaggagttagaatatatatctaatcacgatcctattacaaatgtctataatagaagatatttaaataaaagattacagtgtattataaatgaaaagaaattggataatcaggtaacaatactttatatagatgtagatggctttaaaaccataaatgatacatatggacatgatattggtgattatgtattgattgaaatttctgataggttaaagaagacagttaaagaaaataatattttagcaagattaggcggagatgaatttgtaattataattgaaggaaagttaagtaaagaggaaattaaaaacatatgtgaaaaattaataaatagttgtaaggaaaccatttattcagataattatttatttaatgtgaccattagtataggagttgcaatgtttccgcatgatgccatatctagaaatgttattatgaaaaacgcagatatagcaatgtatgatgcaaaatctaaaggaaagaacagatattcattctttgattcacatgtaagtaatgaaattttggaaaaaggcgagattgaattactacttaggaatgtagattatgataaagaatttgaactttactatcagcctcaaatagatataaacactaataagttaattggagtagaagcgttaataaggtggcattctcctataatgggtaatattccgccaaataaatttataaaaattgcagaggaaactgggtctatagaaaaaataggacagtgggttatgaatacagctgcaaaacaaattggtatatggaatgaaaaatttgattcaaatataagaatgtcaattaatatatcacctaatcagcttgttagtatagattttgcaagtgatttagagaaaatcatgaaaaagtatggtttaaaatcagattggattgatatagaaattacagaaaatattgcaatgaagggtgaagggatttttaagcaaatatttttaacactagataatatgggaatatcaatttcgatagacgattttggaactggatattcttcattaagttacattcagaagttttcttttaatcgtctaaaaatagcaaaggaattaattgataacattacaattgacttaaataaaaggcatattgtaaaagcaattgtaatgctatctgagggattgaatattttgacaatagcagaaggtgtggaaacagaagatcagcttaatatagtaaaagaaataggctgtaatcaagtgcaagggtatgtttatagcaagcctgttacagcagatagatttgaaaaggaatttttattacaaatttaaaatgtctatttcattaaaagaatgtattatagtatctgctttagataaatcttgattaccggaattaggatttttaaaacctatacacttcattccagcatttttagcggctaaaactccgttgtgtgaatcttctataacaacgcattgttcaggtgaaacatcaagttttttagcagcatatagaaatatatcaggatttggtttacttctttcaacatagtcaccagtaacaagctcgttaaattgtttcgctaattcaaagttgtttattatgtactttataacacgcataggagaagaagaagccactgcagttttgaaattattttctttcagggcgcctagaagttctggtatgtgatctatgggttttatatttgtatttggtgatgataagaactcaaagaatccatttctttctttattgataagactttctacagtgttttctaaattgtatgtatcctttatgttactccacatatatagagatgtggtaccgataaatttactgtactcattaggtgtcattgttatattaagttctttaaaaagtttaaacgcataatctaaatgtaatggttcgctgtctataagcacaccatccatatcaaaaataactgcttttatcatagttgtatactctcctattaaacaaaatcaaaggctgaatcgatggtgattcagcctcaggttgtataaaaataaattttatttatgttgttgaaactgacttattgcttgctaatgttttatcagcagttctataatagtatttatttataaggggttgaagcttaggttgaagtttagcaaatacaaagtctgttagttttacggaacagaaagctaaaattaagccgcctaaaacatcaatagcccaatgaatttcaagatacattgtagaataaattacacttaagcagaagaagccccaaatagatttaaagagtaagttcttttctctaagtaacagcaaaaacgctgcaaaggctatagaagtatgcattgatggaaaacaatttaaggtagaaccgtaagcttgtctataagaataatgtcttaaaagcatatcaggatgaccattaacaaaccatacttcttgaagatgaaaaataacataaaagggactgattaaaaatatttgaaaaacatgagcactgcacatgtatttaagcattttcttaatatccttacaaattgctgaacgaaaaatacatatcatagtacaaagtgtaaagccgttattatatacaagacgcataaaccaggttaaattatcacttctatataatcttgcaaaggaagcatcattaaaaggtatactatcaaagataggatttaaattaaatactattttcattttggcttcccattgtataacgctgccccaaaaggcatatccatgtttgtttagataagataaaaacataaatagcggtatacttaaaataataaaacttatccaacgaacatcttttcttatatctttataagcagttaagaatataaatggataaattaaagttatgactttataaccaggcgaagattttccaacgaacacatgaaaatagtacatgaaaactattacgccaattataaatggataaaaattattaaaaaagtcaagaaacttttttaagtaagattgtaatgtttctatgtttaattccttcattattagtacctccattatcaagtctcattatagcatattttgtataaataattaaagaaaatttaacatgaatttgagaaattatattgtaataaaattaatatttttataaaaagaactacttaaaattaagaatgttttatgtgaaaaagttgagtgtaattttaagtagtttttatgttactctatatattataaatattttattttctatttaaaagcttctcattctttttactaatatatcaccaatgaaaacaaaggtagatatgattacaaagaagtatattccttcaagaatagagttgaatataaaagcggacataagtattagaataatcaatccacatagccatttaaaaaagtgcatataaatcgtcctccaatctaaagtgtaaagattatgtgcaataagttactatatatacaaaaaaacgaagactattattcatatagagttttgattgaaaatgaagttattatatattattagattttaaaaataaaattattctaatagtgtatggatacatttgcataaagcatattatgagatataattttatttaataaggtcttatttacatagtatttaatataattttaggaggatttatatggaaggaaattcagcaaaagttaagtataatgttaaggatatagtacaaatatctttaatgtcagctatagtttttgtagcaacgaaacttacagctataccagttggaattgggtataagggagtagtacatcttggcgacagtatgatatttatagctgctattttattatcaagtcgtaatgcagttttgtcttcagcaataggaatgagtttgtacgatattctgtcaccaacaccaatgtggacgccgtttacttttgtaataaaaggaggaatggcatatatagcatctaaaattagttacgaaaaacaatacaaagggaataatatattagttaatttagtaggatgtatttctggtggggtatggatggttggagcatattattttgcgggagcattaataaatcattatttaatgaaatatccttggaatcaaagttttattgctcaaggaacacacataccagcagatatagcacaggttgttgttggtattatcgtagccttacctataagtaaaatcttaaaaaaggcaaatataataagatagagttttacgatataataaaagagaggtttttgcctctctttaataatttctacctgaaatctctgctgaagttatttcttttattttttctagcttttctgcactctgggcatcttacaggatcattttcaaatcctttttctttatagaaagcctgctctccttcagtaaatacaaattcttttccacaatctttacatacaatagtcttatctgccacgataaaaacctccttaaacataggactaatttatcttggatagttttagctcctatgcttgaggaggaaaaaagaccctgataattaaacctaattttataaaatattgagctcacactctataagtaattatagcataaatagtaaaaaaaacaatataaaaatttggcttaaaatcataatgtaatcgtattaaatttggtattcagtataaattattgtagccaaaatcacgataaaattatataataagaatgaaaagttattactaaaaaataaggatttaatttataagaaaagtgggtatatatggatacgaattataagatgttatatgagaaatatgaaaagttaaagaatgaattcagcacatatcaaaattttgcggaaacacaaattcagcgtatgaatggaaaaaatactgaactagaaaaaaaacttgatattttaacaaatgtcatagaagtcagtaaatacataaattcaaatataagcgatgataatttagtacctatgataaatgatatgattataggtatattaggtgttacgtattctacaatatatttagttgaggatgatgaaaagttaatagtaaaggcttcaaatgttatggataattatgatattatagtgaatcctgtgttttcaacttttagtgataatagacctattgtaattaattctaaagagccactatttaaggagtttaaaaataagttaaaggtacactcaattattggtgttccaataactttaagagataactttagaggatatattatagttgagcatacactgtatgatttttttagtcatggacatataaaatttatatcatcaatagcaaatcaaatagctattgcaattgaaaatagctttctttacaagaaggttaaggaatcatcaattaaggatccatttttaggaatatataatagaaagcatttttttgatatgatagaaggaaaggttgcaaaagattcacgcagaagctttgctatcgttatgcttgacattgatcattttaaaagttttaatgattcttatggtcatcaatttggtgatgaggttttaatacagacagctaaaatattagaacagagtattggagaaaaagatgaagttgcaagatatggtggagaagagattgtactttatcttaacgatgctcaaagtaaggaaaaggtgtttaaaactgtagatggaattagggcctctctcagcaataattcagttagacacggtggaatagagaaaagagtcacagcaagttttggtataagctactatccgcagaatggagaaactgttgaaaaagttgtaagcgttgctgatgctatgctctatgaagctaagaatagtggaagaaataaagtagtttcatcattatgagattaaattataagacgttttaaggaggaacatttatttatgtcaaatgttttagatgagttaattgagcgtggatacgcaaaacaatttacacatgaagaggagacaagaaagttactctcagaggaaaaggtgactttttatatagggtttgatccaacaggagacagtttacatgtggggcactttattgcacttatgcttatggctcgtatgcaaaaagcaggacacagaccaattgtacttattggtggtggcacagctatggttggtgaccctactggaaagacagacatgagaaagatgctaactagagaagaaataaatcacaatgttgaatgtttaaaaaagcagatgtcaaggttcattgacttcagtgatgataaggctattatagtaaataatgctgagtggcttatggggcaaaattacatagagtttttaagagaagttggagtccatttttcagtaaataaaatgcttacagcagaatgttttaagcaaagaatggaaaaaggattatcatttcttgaatttaactatatgcttatgcagggatttgatttctataagttaaatgagaaatatgattgtaaaatggaattgggcggagatgaccagtggtcaaatatgatagctggagttgagctcataagaaggaaatcaaataaaaaagcatatgctatgacatcagcgcttttaaccaatagtgaaggtaaaaagatgggtaaaacagagaagggtgcattatggcttgatgcagaaaaaacatctccatatgatttttttcaatattggagaaatgttaatgatgcagatgttgaaaaatgcctttctatgcttacatttttaccaatggatgaagttagaagactggcttctctaaaagatcaagagataaataaggcaaaagaagtattggcttatgaagttacaaaacttgtacacggtgaagaagaggctaagaaagcattaaattcttctaaggctttattcggtggcggaactaacatggataatgttccaacggtttcaattccggaagatatgctttcaagttctatattagatgtattagtccatacaaagataataccatctaagggtgagggaagaaggcttgtgcagcaaggtggaataacccttaacgatacgaaagttgaagactttaactacgagataacaaaagaagacttcaatgatgatggttttgctcttgtaagaagaggaaagaaaaaatactataaaattgtaattggctaagttgtaaatctaataaataaattctatggtgacaggttaaaagtaaaaagtggtaggttggatgatggttatgtaaggaattactaaagttatctttacttacatagtttttactttcaatttgtcactttttagttaaagtgcttttataatatagtttcaatagcaataaaattattcagaaagcatcaaatataaacgataatatatctatatcgaaatttttaggagtgataaattatggccggtttatctaaaatcaataatgcctcaagcagaggagaagccatatccaaaaaaatctcttttgatgtaggagatacattttcagcaagagtaatttcagagaaggatggcggaaatgaagttacattaaagacctcagatggttggagttttaacgctaaagttgaaaatccatcagatattaatgatggtcaagcatcaaagtttgtagttacaggtgttgaagacggcaagattaaactcaaatttgtgcaaaatgaaaatattgatcagagtacggctaatggtaagaatattcttggtgaactggttaatgaacttggacttagtaaatctgatgtagatgaaaatgtattaaaactaatgcttaagtataatatgccattaactaaagaaaatatagctaaaatggaaactatacttgattttaacgataaattatcaaacgaagctgataaaagcgatgaattcataatgaagtaccttcaaaataggagtatagctcctgatagcgaagaaggagtaaatataattaatactttaaaaggtctgtcagaaaatcttaaaggaatgagttcggaggatatgtttacactcatagaaaataatatagatataacacctaataatgtggagagttataaaaaattgttcaagggtgaaacttctatttataacgaactaaaaaacatcgaagaaagtttgtctgacggtaattcagcgtcttttattaaggaaagtgttaaagatgatataaaggatttgtccaatataaatataaaagaagctatacagcagcataatgaagaagttatttcgagtactagtaaacaagcttctcaagagagcaatataaacaagcttcaagacaatcttaagttattggattcaatgaaggaaattttaagtaaaaacgatttaacagaagtagttgttgacggaaaaaaagttaatatagccaacattataaaagattatgtatcagaaaactggcaagacataacaaagtttagtaaagagcagcttgtaggcaatatgatgaataaaatcttatctgaaacaggaatgaataaggaacaattaatagctgtgtttaaggaacttataaataatagtgatatgacggaaacagaagtaaataatttattaaaaaatttagagcctaaggatagtgaaaatctcgcatccacagcatttaaagctgaagagcaaacattactaaataaggttgatgctaataagggacaaattttaaagaacgacaatatgcctcaaatccaaccaaaaactacagcagaaaacgtaaaacaagagataaatttaaagataaataatatgaaagatattgtgggaaagttattatctgaaagtaataatggcaatgctaacatgcaagatacaatagcggcacttattaaaaataatataaatgattttaaagtttttaattctgtaagtaatgaatattattatatggatgttccaataaggaataataatgacgattatcaatgtaagttgattataaaggatgatagaaaatcgggaaaaagagttgatagtaaaaatgtaaaaattgtaacttcggttaaaacagtaaatatgggggaagtagatgcatatataacagtcttaaataatagtatgagtatcaatgttaaatgtgataaggattgggtgaaaattttagacaaggctaaggcaaatgcggttaaaaaaatatcagatatgggttataatataaatatgaccgtagagaaaaagaaggaagataaagagatcgacattgtagaatgtagagaatttttcaatgataaagaatatttcaagttggatactcgagtttagttagtgagtactagattaaaataagtgtagtgctaggagtgattttgtggctaaggagaggaagaaagctgccgctttaaaatatgatttgggatatgaagcaccaattgtaacagcagtaggtgttggtaaaattgcagataatatagtaaaaaaggcatccgaaaatgaagttcccgtggtttataataaggagcttactgatttattgcttaatgttgatgtaggctcaagtattccatatgaaatatacgacgtagttgcagaagtaattgcatatataatggaagtagatagcggattacaaaaaagaaggtgaattagtgggtttatatgctatttcagatttacatttggcttttaatttagataaacctatgaatatatttggtgaagagtggtcaaaacatgatgaaaagataaagaaaaattggattagtaaaataagtgaagaagatacagtattgattgctggagatatatcttggtctatggatattgaaaatggagaagaagatttaaattggattgattgtcttccgggtaaaaaaataatctgcaaagggaatcatgattattggtggaaaagtataactaaattgaataacatgtataaaagcataagctttctgcaaaataatttctttgaatacaaagattatgctatttgtggaacaagaggttggatagataaaagttttgatagcttcgatgagcatgataaaaaagtatataaaagagaaattataagattaaggctttctcttgatgctgcggttaaaaaaggttattcaaaattcattgttatgtttcattatcctccttttaaggatgaaaacagtgggtctgaatttacagaggttttagaagagtacaaagttgaaaaggcaatatacgggcatttacatggacctgcattaaaaaatataagtggaagtattgttaaaaatggtgttgaatatatgcttacctcttgtgattatatagaatttaatccaataaaaattgatctaaaataaaaaaagtttatctgaaaacaaaaaaatataatgtagaagtattcttacattatatatattggggttttaacctatattgttgtttaagcaatagaaaaaaggttaaaaccttagtttttttattaattattaaataacttagaaaaaaggccttttttcttaggagtggtagcttcggagttatcatcatcattgctatcattatcttgagtttgcgataattttttttcgttttcacgaattaagtctttttgatttctagccatctcttttaatttttgaggagctaaggagtttgtaataacattaccaaaccataataaggccttgtcctcatcacctaatctcctatgaagttcgcctattaaatacataagtgaaaatttattcatgccatatatgggaaatgattcattataatatgcatcatcaaagccctctagagcattttttagaaatactttttccatatcttcattttgttgaatcctatacatccaggcaatttttaagcaattcatagcttttttgcttgaatgggcttctattgatacataatttaaaagcgagagcttaaatctctctatagctatatttatatcataaatgtcaggatattttttgctgtgccattttaatgaaatatttttttcaactaactctttttggtaagacttaattttttcaaaatcagatttcatagcagcatagccacaaattggacataaccaaacatcataaaagtaagggttgatatttttatattgtataaaaaaatctgtatccttttttaaaattcttatagcagaggtttttacagttcttgccttaaaggtagtgttacacactggacaatttactgttttatcatacaacaaatcattaatacttgtttttttttcttcttcttttctcattttattctcttcctttttgtttttaccatatatatctatattactgacatcttcaaatcctaaatcctttagttcggaaaagatattgctatccatagaatcaccccaagcacaaatagatatcaaatatattatagcaaagaattattataaagtatatgtttcattttgtgttaaagttttatcataacaattgaaaaagtttcattatgtaattataattataatgtagagaaagtagttttattaataattaatatatgcatagaaatgcataaaagaaagtatttagaatgtgttgatagttaaaactatataacacctacagtaagcgtatatttaatatgttcgctttatttatatgggatgattatatataaattacggcaaaggaagatagaaatatggctacaattgaatggaagtcttttttgataccttacgagcaagcagtagaagaattaaaggttaagtttaaaagtataagaaaggaatatagaaaaagaaatgaatattctccaatagaatttgttactggaagagtaaaggagatttcaagtatactagaaaaagccaataagtttaatatacctgatgaaagaataatgcttgagatggaggatatttgtggaatacgtataatgtgtcagtttgttgacgatgtaacaaaggttgtaaatataattcgttcaagaaaagatatgcatataatgtatgaaaaagattatgtaacaaatgtaaagagtagtggatacaggagttatcatatcattataaagtaccccgtaagtatggcagaggggcaaagagatattatagcagaaattcagataagaacacttgctatgaacttttgggcgacaatagaacattctttaaattataagtataagcatgatatacctgacgagattaaagcaaaattaaaaatagcagcagatgcagcatttcagcttgatggacacatgcttgagattaaagatgagattaaggatgctcaaaagctatttgaagttaaatctagtattgtttcaaatattataagaaatatacttaccataacatctatggggaagttatcagaagcagatatatataaaagtaagcttaatcagctaattaataagggagaggtttttgaattaaataatctccttagaagtacggaaaagacaatagaaatgggtagataaaaggaagtagaaacttaaaagtattaaacagtttctacttcctcttgttttttgcctttagatgatttcttttcttttaatataaatattattgaggctacgaatggaattattatgaaatttgcaaaagctatataggtgtagtaattaatcaaaacaaataaatttaatacgcttctatttattgcaaatgatataattgctacacaaattgtaattacataaaatacatattttctctttacatttaactgttttaagattattaaaaatgcataaaaggttaagatatactttacaaaccatcctccaattacttgaaacagtacataaagttcaccactttctataaaattaaagtagttaactagttgtgtttgtagtaaacgtggataataagcagcaacgacacgtggtgcagcaatagtcataagtaaaccacttgttgcaaaaacttgaatttgggctattaatatccaagctataagaattggtttttttatttcttctcttgattttaccttataaataaagggtattattataccaaaacctgaaaacatagcaagacctttaaatacgcaggtaataaaatttttattgactccatgcttcataataggcaggatgtattcaatttttctataggcaaataataaaaccgaaagattacatccggaaataaatataaaaaatatacctacgattgtcagtataagcattgaattttcaccgtgtaaaattacataagttgcaggtactataaaaaataatataaaataccaaggtggagttttatccagtatattaactccaagcatactgctttccgaagcagaacattctattaaggttaaaattagagtaaatgcaaaagcccataaaagaaatgctccaagatattttccaaaagctttaaaatacacggttttaagttttgcatcgcttttagtagaaaatgcttttattataatgagcaggaaagcaagtaataagagcgatgaaaaaatcaaagcgagccaagtatccctctctccatattgtattaataaagtagggtaggtttttatagtaacgattgatgttcctagtgctatgaaaattaaataatttttacttaaatatctcattgtaaatacttcctttatgtaaaattgtaataatattattttctaaatatatgaatattattcacctttaaagaaaacaatagtttcgggtggtaaacatgaatgaagaaaatttaaaatatataaaagataagcttaaggataatgttgatgtgaagtacagaactatagattctgagaatggtcaaataaatataatatttatagataatttatgtgattcaaaatttataagtgaatacataattgcacctataatcagaggaaaagacttcataaaaactgtatctaacctagagagcaatgcgcttcttgcaaattctataggaaatgttaaggataaggaagatatgctgctccatatattatctggagatgttgttatacttacaaatttctatgatgaaattatattttgtgaggcaaagggatatgtaagaaggggagtttcaatacctataacagaagctgtaataaaaggaccgagagaaggctttacagaagcttttgtggataacatatcactgataagaagaagggctaaaaatgcagatttaaaatttgaaagtgtatttttgggaactaaatcaaaaacagtggtggttctggtatatttaaagggaacgactccagaaaaactggttaaaaacataaaaaaacaaataaatgagataactactgaatatattttagattcaaactatattgaagaaaagcttagacataagagaacagcttttgataccattggatatagtgagaaggcggatatagtggttaatcatttatttagaggtaaagttgcagttatagttgatggaagtccctttgttgcaattgcgccatactttttttatgaaaactttcacatgccagatgattactatttaaataggatagttgttaattgtactagagttttaaggtggcttggtttttgtatctcaacttttcttcctggactttatatatcaattataacgtatcatgtatcccttattccgtcggtatttgttttccggttagctatatctaggtcgggagtacctcttccaacaattgtggaacttcttatgatgatgtttttctttcaagtattgagagaagcaggagtaagacttccgcagccagtaggtcaggcaatgagtattgttggagctcttatattagggcaatcagcagttgaagcaggacttacttcggagataacaataataatagtagctttaagctctatatcatcatttttaaccccaaatctatatggacctatttctatatggtctgtaataatagcattatttgcagcattttgtggccttggaggattttttacaggagtgtttgttatgatagctcatattggttctcttaaaactgttgggtatctatatgccttcccaattggtacttctaagataatatctcacagcgataggatactaagaggagacctgcaagaagcaacagataatattttacaggaagatgatttgttatgagaaaaaaaataacgaccatatgttcaataataatgtgctgcgttatgctaacaggatgctttaattacaaagatatagataatgttttatttgttacaacagtagtttttgatatagatgatgataacaatgtaattacttacctagaagtttttcagccaattaaaagcatggtaaaagggcagcagggacagcagagattggtatttagaggaacaggaaaaactgcttttgaggcattaaatgacataaaccttcactgcagctatgaattgaattttactcaagtaaaggcatatatatactctgaaaaagcggctaaaaaaggaataaagccctttgtagatttggttagaaggagaatacaattttacttaaggccttatgtggcaacttttattggtaacgtagaggagctaatgaagggcggatttaaagaaaatgaatatgttgggtttttgttatcacagcttataataaatacaggagcatcatcaagggcggtggagattcaatataatgatttcttaaacaaaagaattaattctgacaggagtgttgtaatgacagcaatagatataagatcagctcaaaataaaaattctgtagaacttgatggaggagctatttttaaaaacgataagcttattgacaagatggataaatccgagacggaagcatacaattttatgataggtaaggtaagcagtggttcaatggaggtactaaacccggaaactaatagagattttatatcactttggatacttaatagtaaaacaactacaaagggaaaattctatggaggaaagtttcacgtaaaaaagattgtaaatgttaaggtagcttttttagaaagccaaagtcctataacctacaataagtatatgcagaagcaaatagaacaaaatgcagaaaagaatataataaataactgcaataaaattttcaataagtacaaggagaaaaatgaggatatattcaacgtaagagatgtatatgaaaatatatataaaaagggtagtcctgatataataaagaacactgtaattgatattgagcctcatgtacagattgaaagaagtggtaaagcttcaacctttaaataataaaaaataacatctgattttaatttatcagatgttatttttgttatttattatttaacaactatgtttacaagacgtccttttataactataaccttaactatattctttccgtcagtagcagctttaactttatcgtcagctagtgcagcagatttgatttcatcttcacttaagtttgttgcaatatttattttagctttaattttgccatttatctgaatagctatctcaacttcatcttttacaagagctttttcatcaaattctggccacttttcattaaatactgaatatttttcctcaattatattccattgttcttctgcaaagtgaggtgcaaatggagctatcagctttataatatcaatagtggtgtctttaagaagcttaatatttttattatctacagttagatattttgataaagaatttgtgaattccataagcctagctatgcatgtattgaactggaatttatccatatcttctgttacagctttaattgaatgatttctaacataatttaattctttttcttcttttcccatatctgtttttgagtttttaggattatttatttcttcttttgcagtttcaatcattctagaaaatctgtctacaaatttggacatggctttaactccgtcatcactccatgcgccgccttcagcatagtcaaatccaaacattagatacattctaaatacatcagagccgtgctcagctataatatcatcaggtgaaatagtatttcctttagatttactcattttttgaccatcaggacctagaattaagccttgatgtcttaaagataaaaatggttcatcaaaattaaggtatccaatatctcttaatgcttttgtgataaatctagcatataatagatgcatacatgcgtgctcaggtccaccaacatatttgtcaacaggaagcattttagatatcttttctttatcaaaaggtgcatcgctattttcattatctgcatatctcaaatagtaccaggatgaacatacaaaggtatctaaagtatcggattcccttgtagcatgacctccacaatgagggcaagttgtgttcataaattcctcagaagttgtaagaggggatttaccagtaggattaaattctacattataaggcaattccactggaagatctttttcaggaacaggaactattccacatttttcacagtaaacaactggtattggagcaccccaatatctttgtcttgaaactaaccaatcacgaagtctgtaatttaccttccatcttccaagatcattttcagaaagtttacttacaatagcttcctttgctttgtttcctttaagaccatcaaattcaccgctgttaaccagtgggccataacctgtgaaaggaagctcttcaccgccttcaacaactctcacaattggaagatcgtatttagttgcaaaagcaaaatctctttcatcatgtgaagggacagccataactgcaccagtaccgtaagtgtatattacgtaatccgcaatccatataggtactttcttgttgtttataggattgattgcataagagcctgtaaatactcctgttttttctcttgtaagtgattgtctttcaatttcagattgcttttgagcttgaagtttatattcttcaactttttctttatattctggttttgtaagctcatcagctagagggctttcaggtgcaagtactacataggttacaccgcatagagtgtctactcttgttgtaaatacatcaaattttaagtcactgttatcaaccttgaaggttacctcagcacctttggatttacctatccaatgtttttgcattgcctttgttttttcaggccaatcaagctcatctaatttttggagaagttcttcggcataattagttattttaaagaaccactgagtcaaatctttttttataacctctgttccacatctctcacaagagccatctactacttgttcatttgctaaaaccgtattacagctagggcaccagtttgcaggagctttttttctataagcaagaccgtttttataaagttctaagaacaaccattgagtccatttataataatcaggcgtacaagttattacctcatgatcccaattgaacattgctcccatagattttaactgtttctccatagtttcaatattttttaatgtggagtccttagggtgaattcctgtttttatagcatagttttcagcaggaagaccaaatgcatcaaagcccattggttgaaatacattataaccagtcatttttttaaatcttgcccaggaatctactggagcatagttaaaccagtgtcctgcatgaagctttgcgccagaaggataagagaacatctccaaaacatataattttttttcgagattattttcatcaaatttatacagacttgtttcttcccattttttttgccatttttcatcaacttttgtactataagtactcattgtataacctcctaaaattaatatatacaaaaaaagctttcgtctcagattgagacgaaagcattacttccgcggtaccactcaagttaggaaatacctcacttaaaaaattaacggatttaccgtatttgcttttctgcaaataagctcccaagcgagttcatattttttaatactgtttctcaccaagcaacagctctcttaaaataaataaatattactactcttgttcaaagcttttaaatattcaaataatataattaaaacaattataaaataactaaaatttattgtcaagataaaataaaaagcttcaattaatattgaagcttttggctgccctagcaggactcgaacctacacagtgcctgaaccagaatcaggtgccttaccaatttggctatagggcattaaaattgtaactgtattcattaacagcaacaattaatattatagcaattttttataatatgtcaatagttattttaaattttttatgatgtgcctgttgatataaagcacaaaaagagaaacaatgtaatcataaagtagaaaaataaattcaaggattacaactataatataaattgggaaatttttgtacatagtgtttaaaaataaagttttgtataaagtgtatattacgaaaattacagcattaaaataaataagcttaagaagtagttcaataggtaattttcgtattctttctatatataattttacaaaaccaaagtttccaaataataagatgtatataagtacattttgtctaaaacccaaaagtattaagcttaagattgaagtagatgcatataccataagtgaactccgtattccaatagtgagaattgaaagtggaattactaaagatgctgctgctaaaaaggaaagtctaccagcaggaattatggtagataaataaataaatacaatgcatactgctgcataaatacttccacgtgttaggctttgagttttactcaattaacatcaactcccttactttagcagcctccacccatgcagtcacacaaggtatcagcacaccataaacttacacataaattacatagttgagaatctctatctgcatatcctcgtgaattatatggatttctatagctattattttgcgttcttaggctttgaagagcattcatatactcaggattagaaggatttaaatcacaagccctttgtatatgattatatgcattatcgtagtaaccacgtcttaaatagacgtttcccataagaaagaaccattcagcatctcttaaatttgttctattgagttttgcttcagctgaattgatatctccacggtttaagtcgtttcttatagaattataatctgcattattactactattcccgtaacttgaattattatatgtagtattttgagactttttcattaaaaaatcataagcttcatttatttctctcattttctcttcagctaaggtttttaaagggttgtttccgtattgatctggatgatactttttagcaagctctctataggcttttttaatttcatctggtgaggcattttcatttaaaccaagtactttatatggattatccattattatcactccttaaggtacaatttatatgaagcaaaatataaaacttaacctatttatagtcagaacacttaatatttagcaagtgttttttgtattataaatttaaattattcattttatcaagcaaaccgtattgaagaatgttaaaaagtatatcttgatttgtttttaatggaagcaaatttaaattgtgaaggcagttacttccacacatagataatacaaaagatatttttggtgaaatatcttttattaaatcttcataaggtttatcatctaaattcattgtgttatttatggcattaaacttttttaatttaatatcttctttaaggtcatcatatgcatccattatatatatccactttccgagattgtagcctatattatatagtatgtctttatatggcttattatcagcataagaggatattataaaggctgttaaatctgaaaatggatgagaaatctcgtctagtgttagattattactctttttttcaagtttatttaactctgtaagactactttttatgtaatcactatacacatagaagggtttgggaaattttttaaaataacctctgagaagtagtgatttaattttacttgatatttttttatcatcgttaacatcatctacaagtttataataaacaagacatatgttgaaaaaagcagcataatctagagccttattgtttataatagcatatttttttttataaggatgagcaatgcatctattaaggcgaaactcacactttttatcttctaaagcatcaagaagaactgccaaaaaagtcatatcataatttagtacagaccttggtaagtttccataattcttttttattgataagcataagccacaatagtaagacttgaatttctcatagtcctttacttttagttctccccttaaaggaaggacgtatccaaacattataaaccacgactcttttcattgagtatttcgtagattgttttggaggatgtgtcctccatagaatatcctaaaagtttaactatatcttccagttcgttttcaaaagcagtttctatttctatatatggaaaaggacagaagtctttatcatttatatcgatttctattaaggaatttttatacttgtagctttccctatatttttttatagattgtttttttactagacctagagctttaaaaatttcttcaccttcagaaggatcacttatttcaatttcatgttcatccattaccttaaacttttcctgactaagcattttttttacagtcatgaagtaatgattttttttatcaagcatattctctactattcttattcttgcatatcctttattatctagaagttttccgttttcaaagtcatatatgtcatttacttgattttctttttttatatttattgcatttacgctttttagtatagttcgtatattttctacgtctatatctataattcttgtttcagcttccttcaatatgttcacctcgcaaacaaattgtttttttatatattatgtattatatcatatataatagaaatattgtcttgattttatgtctttaaagaatttagcattatgttataatatattttaaagtctatattgaacttacaattttattttaaaataagattattaaagtggtgatattattggaatatataaatgaggtaactataaatgaagcaattattcatgtattggataatagttcagagggagttgtctttaatgaagttgagcttgaacttaatgaagaaacatatgaatatatacttaagcatatacaaaagtgtctaaaggatgaagaacttaaatatgctgtttttaatgttgaaagaaatttggcaaaagagctgtcgcaggagtacctagatggtaaaagcgatattgtaagtgtttcaaaagagcttgcatcacagctatttgtaataatgaagtcaaatggaaatataccttcctgtgatcttttaacagcagctataacaacagaatatggaaggatgcttgtagtattaaaaatggactatgtaaaaaattatacacataatattgatgtggttgatgataaggttgaaataaatataattccacagtttattggactaccatctagtggtcaaaagatacaaaagtgtgcatttattaagccaattagagaagaaaataattttgatttaatggtaatagataaaaatagcggtaaaaaggatgaagatgagtacggttcaaattatttcataaacaactaccttggttgtaagattataaataatgaaagagacttaacgaaaacctttgttaaatctgcagaaaagtggacacaaaaaaatttgaaggacaatgctgatgcagcagaacttgtaagaacatctataaaaaaaaggcttaaagaagatgattctataaatataaatgaggtttcagatgaaatttttggagaaaataaagaagcaaaagataatttcgttgaatttataaaaaagcagggaatagaagaaaaaatagaactagataagcagtgggtagaaaataaaatgaaaagaacaagattgaaaatagacaaggacatagatttatatattaatgaagaaacctataatgattcatctagatttgaaatcaagagaaatggcgatggaacaataaatatgattataaaacaagtaagaaattatgtggaaaagtagatacatatatatattaataatgtaaaaaatattagaaatcaaagggagagaagtatgagtataacaataaagtttatactatcagtgattttgataaagctttttaatgatatagtcaataaaaagagtaaacaagagaaaaatgaagtaccattgaaatattacataatgaaatgtgtttttatattatatctaatagttgtcttagatgtagtgggatttccgtctttatgggagtggaaaatgatgatgagtcttagtcagccaatatttaatccacatataaatttaattccttttaaagagatgggtattgaagatgctcttaatatagtattatttatgccctttggattttttttgccgactctatggaaaagataccacaagttttggatgactgctagttttggattggcattttccttaacaattgaactaagccaattattttcaagatctcgtgtaacagatatagatgatttgataatgaatgggttaggtactgtattaggctttatgattttttatattattagaaaaaagaattatcatactgatgaaaaagaggagaataatttatttgttaaagttgaaccttttgtatgtattattattgtaattatatgtaattttcttttttaggtcaaataagctgcaatataaagtagaaaacttgattttatattaatatttgaagccaatttttgttagtattaatgtatttaaaactactatagggtatattttagtagatgctaaatagctaggggtaaatgatatattatgatcatttgatgcttaagtaaattattggtataataaacaacataataaacaaattttgcttattttaacaataagatcaataatttataaggatggtgtaaaatgcatttgctaatagtagaggatgatgaagagttaagtatattattaaaaaaaggattaaaacaatataattgtacatgtgatatttctcatgatggagaagatggattgtacaatttggagataaatagttatgatgcagtgattttagatataaacttacctaagatggatggtattacagtttgcagaaaaatgaggggaaaaggtataagtaccccagtactaatgcttacagctagaactgatacagatgatagagtgttaggacttgatagtggagcagatgattatttaggaaagccttttgaattcaaagaattaagagcaagacttcatgcattaattaggcgtaactataataaaccttcaaatgaaattaaaataaaagatcttaatattgataccaaggcaaagtctgtaaaagtaggtgaaaaattaataacattaactgcaagagaatacgatatattagaattactttgctataattacccaaatattgtttcggcagaggaaattattgaacatgtatggggagataatgataatcaattttctaatgtaatcagagttcatattgcaaatttaagaaggaaaattaaatgcagtggtggggaaacgttaatagagactttgaagggtaaggggtataggctatgctgaagataaagagtaggatcgctctactttatagtatgttgactatagctttaattataatctttattatttcattttgcttgattttaaatatttatattaataaaagaccaatattggatagtataacaaaagtaggagataaaaagagtgaagagataaatagtaataatagaaatatacatttaacaaaaaacttcatatatgaaggggcagaagggggaaagataaaaaaatctaacatacgggtagataatagtaagaaggattatataattggctttgtatatgagaaaaaaggtggagtaattgatgtatataaaacggaaaaaggaagatatcaaaataaatatactcaaaattatttagaaactatatttaataatggtaaagttataatatctactatacttccagatgattattcagaggataatctgagtaagtgctacggtactaaaaatttaaagtattattctaaaggccagattttcattaaggatttacttaaaaataatatgagtggtaaactatctatagtaacagataagaatgatagcgtaataagaatccagaaaattgatgatagtgtttatgataaaatgtttggtgaactttcaaataataagggatttaaaatgacatcaggagaatttgaagctgcggtaatgcatgtactctataggagatttatttatattatatttataattatattaatgattactataataaactttgctttgagtaaaacatatgtaaggtttgcattaaaaccacttatagagtttactcataaaataaaagaacaaagtaatgcagaagagataaaatttgtagaggttccaaaagtaaatgatgaaatatatgatttaacatgtgcttataatttagctatggaaaaaataaaaaattcgtatgatgatttacagatattaaattcatatgcgtcacatgaacttagaaactctttagctattctaaaagcaaaacttcagttgggagataaaattaacgaaatagaagcgtatattgataaaattacaaatacaacaaatgatattatggcaatgtcaacacctaaattattcaatgatgagaatgtagatttagcattagtttgtgctaaagtagttgatgagtatatagaggtctttagaaatatagagttaaagttacctgacaatggtgttgagttaattaaaggaaaagagctgtggttagaaaggtgtgttgccaatcttatagataatgcaattaaatttgttgataaaaataaagcatataacgaaatacgagtagaagttttggaagatgaaaaagatagtattattagggtatatgataatggtataggaatagatgaatcaaaaattgacaaaatttttgaaccgtactatggaaatagtatgcgtctaagtacaggaattggacttgcatatgttaaacatataatggatttacataaagggagggtattggtgaaaagtaaaaaagaagagtatagtgaaatatcactaatattttctcgaagataatttactaaaaaaataaaatatagaaccatatattctaatcattatagattacgaatgtatggttctttttatttctagtattatagtttgcgcaataatataaatttccattgtcatcaaatttggttattattacaaagtgattgtatctaatggagttttatggatttaattgaaaaattccgtaacaaacgttaaagtaggtgttttttaattttcaatattctcttcttttttgctatgtggaaaataatactattatgtatttaaaatataaaaaataattttatcgtacttagaataccacaggttttacctgtggttacggaaagcttatagatatgagtagaaaaaagaaaaaccccaatataaaatagaagtgggtttgccaacaacaactaaagtatattggaggtgtgtccaaagtggacaatagtagtttagcacatagcaagtagaattgtaaatatcatatagtttttgcaacaaagtatagaagacaaataatatggaaaaataaaagcggatataggaataatactgagaaaattatgtgagcaaaaaggtgtagaaattattgaggctaatgcatgcaaagatcatatacatatgctagtaagtataccacttaaattaagtgtatagtaatttatgggatatttaaaagtgaaaagttcactgatgatttttgatagacatgcaaatttaaaatatagatatggtaataggcgattttggtgtaaaggatactaagttgatactgtagaaaggagtagaaaagtcatagaagaatatataaaaaatcaaatacaagaagattttgcatatgaacagataagtttaaaagaatatattgaaccgtttaacgggtagttatgattggcttgcattttaactgaacaggagtattattttagtaaggattttttgggataaattggtaataagtaaaatataattaatataatttaaaatttaactatggggataaatttagtatgtttttaagttaataacatttgcttcctaattttttatatagttattagattaagaagcaaagtttattaaaatataataaatggagggatttttatgaaattagtaaatccagtaggaagagatttaactgaactagaaacagaggcttatagttgtcattgtgtatgttcttcggcttcatataaagcgcagagtcgtgggtttgatgaagtgtatgattcttgtgaatgtgataattgggagtatgagactaacttatatgaagtaagcacatatggaattcgcaaaaataactagtttacaggagtaatactttttattgttgcaatttgtaatgaactattataaattgtagtacttaataaacctaaaaagggagtgtcgcaaaatgattaaaattaatcatgagcgatgctcttttttatttaagttacaaaatctccaaatattttaaatgctaaattaattatttgaatttccatgatattttagcgcactaaaataaacctaatcatattattccataattaggaaatagactttaattcatgaagatacttttgagttcttttattttgaattttcgagtgtaatttgttaatgttatatccaaaacaaagcaaaataaattcggttttcacactattttttccacgtgttaaaaatcttttgaattcatagtcgctttttaaaactccaaatgcaccttcaacttgaatagatctgttcattcttaatttagttcccaattcagttttgatattgttgtaggaaatttcacgctttttaataaaagcctttgaaacctgcatttttcgattcttctttgcttttgtgcactttggtttcaaagtgcagttatcacaaatttcacattcataaacagtaacctcagatgtatagccacttgcagattttttatgaataatacatgatggtgataattttctattattatggcaagtatatgtatctgttttagcatcatattccatattttcacgtctactgatatcatttttaaaacttctttttttccacttctcataagtttgaggttttatatatgggatttgattattagactctaaaaacaaatagttttcttcactttcataaccagaatccgcaatcacattggtgtatgtatgaccaattttttttgcatgttagtaatcattggtattaatgttgctatatcatttctatcatcaaatactccaacaccagttacatattcactatcaactgctatttgtacattataggcaggttttaattgaccatttctcatatgatcatctttcatatgcatgaaagttgcatcattgtcagttttagaatagctatttctttttgaaaatattttcttacttaaattatatttttcttgtctttctttatattgagatagttgttctatccatttctgaattttagtttttcttttaccgattccatgaacaaattctatatttcttttttctttttcaaataaaagccattgaagaattttatttatatcatctatcaaagtttcttttccaatagtaaatccttttaagttttcaagattaatatcttcaacaagagcaataattttatcaaacatcttgccctcatttttataaataactttcttccaaacaaaagtgtatcgattagcatttgcctcaattttagtaccatcgataaatacattttcaaataataattctttttccttagctaaatagttaacttgttgataaaatagatcttcaattacttcatttgaaaggtatttttttctgaatctacttatagtagcatgatcaggtactttaaagctttgaagtagccacttgaaatttatatcccttttgcatgctttttctatttttctacttgaataaatattttgcgaatacgcataggatattattttgaacatgatttttggttcaactgctgattttcttcctaaggaagaatacgctttgtacaattttttataatttaatccctccaataaatagcttagcaagcgaacagaatcatcttccggtattaagttttctaaatttaatggtaatataagttgcaaattatcattaaattgattataattttttgtgtgtaatttcgttactagcatagcttaattatacaattaatgtgagttcttcggaactcacattttttatatatagaaaaggagccatttcaaaactaaattagttttgaaacaacccctttaatcattcgatttcaaggatttcatcgtactatagcataaaagtgcatttaagtcatttcttcctgtacaagttgacatatcaaatgtaagtttttctgttgtaacaggatttcttgaagtacaccatttttcagcataatttgcagctgattgtctttcagttgaaatttgtatttaaattataatttaataatttagcattaagttttttgtaacaagcgttaacgtaggtagatgtaattaagtaaacacaaataaaagtggaatataaatgaattttttaaaaaatttttattcctgtgttttgcataacagtgtaagtaatatattatgcatactcctttatttttgcttattaggaaataataccattatttattatttttgtaaaataggaaagataaagaaagtagcataaaaataatacataagtaatactataggatatccatgggttttttgaataattttactgttttacattttgattaaatataagtattattttagtgaaagttgttgatttgaaaataaattacaagtatgtaaaatataattaatttggaggctatagatatgtcaatttctgagcagtgtgttatagagatagataagtatatagattactttaaaaaaaatactagtcaacctaatattttagcaaaactttttaaaacagattcttcatattatgtttatgatacgggaaccaataaagtattaacctgcggggagtatgagtatagtatattaggaaaaataattgataataagtttgacgagatatcaagaattaatgatgatgcggataaatccggattttatgaagccttagaaaatgtaaggcaggcaatagaaaaggaggacatactaaggggtggtaaagagtggaagtttgtatcaaaaggtcatttcgaagaattagataaaaaacttaattatgaattagatcagattactcttgagcttactgaaaaatgtaatttacgatgtagatattgcatatataatgaatcatacgaacataagaggaattttggaaataaagatatgcctattgaaatagctgaaaaggctattgattatgctaatttacatagtggaaaggaaaaaggagttggagtaactttttatggcggagagcctttggtgaattttaaattattaaaacattctattgaatattcaagaaaagtaataaaggataagaaattaaccttttctctgacaagtaatctaacattaatgacacctgaaatagctacttatttagcttctattgaaaatttaactatattatgtagtatagacggaccagaagaaattcacgacagttatagaaaagatataaatggtaatggaacatttaaaagggctattagaggattgaaatatttaatagaagcatttggggataaggctaataaagcagttatgatgaatatggtatttactccaccatattctatagaaaaagtaaacaaaatagaaacttttataaatagcttagattggcttccaaagggtttacgtatatcaatgacttatccttcaacaggaagcgtagatgatactccaccaaaggggtgtgaaaaaaattatggaatggagctaattcagtggtctgaaagtaagtataaaagtgagcttaaaagtgatggaaaaatagatatgtttaatgaggagtttgttgtacatcctattctaagaatacatggtagaagaataagtgctaaatcagaatctgggtatccagtaaatggttgttgtattccaggaagtagaaaattatatgtaactgtagatggtaattttcaaatttgtgaaagaataaatggttcccctattataggaaatgtatttaatggtatagatgaaaataaaataaaaaatgaagtaatagatgaatttataaataaatcaattaaagattgttctaggtgttgggcagctcgtttatgtaatgtatgttattcacattgttatacagatggaaagcttgatatgaaagagaagaaaagatattgtattaggtcgcgtgaaagggcattaagaagtttggttttttatcataaatgtgctgaaataaatccagaaaaacttaagtatttaaataaaatagaggtttcttaagtaatattaaattttctactggtaaaggatgttcttatgaataaagaagatgaaggtaaaaataatataaaaaagaatactttaaaaaataaatttgcgtattatatttgcaataacaaaaagtctaagggaaaagtaaagttggctttaatagtaaaagcaggctctttaatggaacaaggtttacccaatggcacagcacattttactgagcatctgtgcatagatagtaatgtggcttatttgaaaaatgtaggtaaatattatgaagacaacaatatattacaagggtatacaaactttgaacaaaccgtgtattattttgattgtactattgataatatagatgaaggttttagtgtgtttaaaaacattttatctgattgttttatagatagaaggttaatggagaaagttaaaaaggatttaatagtagaaattgattatagaatgaaatgtgcaaattttggtttgcaaaataatatactaccggtaataattggtgataaaaatattaaggataaatttccattaggcaaaataaagtgtatagaaaaaatggaatttcaatcggtaaaaagctttcatgataaatggtacaagccacaaaatagtgctatttgtatttgtggagatatagcgaattctgatatagaaaataaaatcagcaagtatttttctgaatttaaaaatgataatgaaaaaattgaaaaatacagcacaaattattgtccatatggagaaaaggtagttgtaaataataatgtgaataaaaatgaggttaaggcacaattttattatttaaaaaaagattataaatatagtttaaaatcagatacaattgaatattttttattcagcataattaaaaattatattttagatttatttaccgataaaagttttggaatagtagaattttactctaaggtttttcttcataatctgaagcttaatgtgttggagtttaaatcacaaagtgaatttgtagagaggcttgaatttattattgatagtattaataaaattcaagcaaaaggaattaatgaaaatgattttgtaaaatataaaaggattttttacaaggatttaaagagttatcataaagagtacaagtattatcaaagtgaagaaattataaaagaatgcataaataactttttatacgatgaagaattaatgacattgtctaatgaatatgaagcttgcaatttgattgttgataatataaaatttaaagaatttaataaaataatatctcaagaacttaataataaaaatttaatattagtagttaatggacaagaaaaatttaatttggagtatatgaataaatttagtaggtttttaagctaataatttttgctttctaatttcttatatagttactaaattaagaagcaaagtttattaaaatataataattggagggatttttatgaaattagtaaatccagtaggaagagatttaactgaactagaaacagaggcttatagttgtcattgcatatgttcttcgggttcatatactgcaaagatgcgtgggtatcatggaggttatgatgcttgtgaatgtgatgatgtggagcatgccactaactcggattacgcagacacatttggaattcgcaaaaataactagtttacaggagtaatacttcttattgttgcaatttgtaatgaactattataaattgtagtacttaataaacataaaaataacagttccttatatgaaatttatttatatgagaaactgttatttaactattcagtagaaagatgaagcatccactatatgcttggaaggtgattatttgaaattttgagaggatagatatttattatgaaatatagcaatattaataagaaattaggtagttttttaagttcttcaaaaaatataattaaaacagttaaattactttggaaaagctcaagtttaagctttattgcaacactgattattactgtattaaatggtataattgttccaattaatatggtaatttcaaaatatttaattgatagtgttgtaaatgcattaaaaaataaaagtccaattgattccttaaataaagttcttttttggttagtagtagaatttggggttattgcattttcctacgttataggtagagtaaatacatatttttcaactattcaatctaaatgtttaaataacagtatttcagaacttcttataaaaaaggcaaatgagttggatttatcatattttgaaaatgatgaattttataataaaatagaaaaagccaatagccaagcagtaggaactactattcaaattgtaaatggattaacacaaattgtaaagaattttactacgctagttggagctattgtaattgtatttcaattaagtcctattatacttttgctttgcattatgacatccataccgatgtttattataaatataaagatttataagcaaaaatataatatttacagtaaaagaatagagaagacaagattggcgcattatttacagatggttatgatggattatataccagtaaaagaaataaaattgaatcgtattggagattggttggaaaaaattatactttctatatataaggataatctaaatcaggataaaaaaatcgaaaagaaacagcttttaattatgagtatagtagatatttttaatacaattatctcatatggatataagatttatgtgatttttataacgttaactcaaaggttaagtattggttctatgaatatgtatatatccgcattgacaaatttagaggattcagtaaaaaatactttggataattttgctttactttattcaaataatctctatatagaaaacttattttatgtgcttgacttaaagccattaatattaaataacaatagtggcaagaaagagtttataaatgaaatacgggattcaatagaatttagaaatgtatcctttaaataccctaattctaaaaaatatgctttgaaaaatgttagttttaaaatagaagcaaatcaaaattgtgctatagtaggacttaatggttgtggaaagacgacacttataaaattgttaactaggctgtatgatcctacagaaggagaaatatatatagataatataaatatcaaagaatttaatatagaatctctatacaaaggtataggaattgtatttcaggattttatgaagtatccatttgatgtgaaaaagaatattggatttggtaatattgataatttagataattttgaacttattaaaacagcagctaaaaaagcaaatgcatatacatttatacagggattaagtaataaattcgatacaaaacttcagaaaatgtggagtaatggagtggatttatcactaggtcagtggcaaaagcttgctataagcagggcttttatgagtaatgcatgtttactgatattagatgagcctacggcatcaattgatgcaaagtcggaatatgaattatttaaggattttaaagagttaatgggagaaggaactagtattttaatatcccataggttttctaccgtaaaaatggcagataaaattattgttctaaaggatggtgaaatagttgaacaaggaaatcatgatagtcttataaaaagtgatggtttgtatgctgaattatataatatgcaggctgacgcttatctggtgaatgaagataagaatattgatgtgagtaaagataaattaaaagacatagtatgagttaaaagacatactatgtcttttaattattggtgtttcaaattaggaacttatattaaaatttaaaattaacacttagaaaatagtgtaatcttaacgttaaattaatattacatttgttaatattagttggaaatcagttcaactattaactatatcttagagtatataagggggaaatattaaatgaaaatatcaaaaaaacgattagcaattattggtgttgtcatagttattattgctgcaataggcatgtatccagtatttagtaaaaaacttctaaggtcaagcgatccaaatacattaactatttatgctttagcttataatggaaagcttaattatgatatagagcctattgtaaatgaatttaaagaaaaatatcctaatataaaattaaatatagtgaaatttagtagcgatagtgaatatcaaaaatataatgaaaaaattttaagtgacactttatcaggaggagggccagatataatatattttgatcctgaggatactaatgcaagagcttttcaaaaatctggtatgcttgaagatttaaagccatatatagaaaaggataaagattttaacaaagaagattataattcaaaacttttaaatgctggaatgtataaaggaaaattgacatttatacctactgattactgtgttccagcttatataacaacaaaagagctacttgagaagaataatattaaaattactgaaaatatgtctcaaaatgattttatgaagtcattgagtggatatatttcaaatgctaaaagtaccaatggcaaaacactttttgcaaaatcaatagatgtaggtgattttattgcaagtagtggttttgaatgtgtaaattatgagaataaaaaaatgtattttgatacaaaagaattcaaagatataatggaaaattataaaaagatatataattcaacacctaagaaaacaaataatgaaagtggtgaggaaggcttacaaggaataaaaaatggatctactcttttttcaacagataatggttatacatgtggtgtagagttttttgaatctgagtcgacaataaaaggattaacaggacaaactcaggttataaatagctttccgacttatgaaggaggtaataaaacaattgcaattgcagaagatttaataggaatgagtaaaaaaacactaaataaaagggctgcttataactttataaaactggctttatcagagaaagtacaatgtgatgataaaacttatatgccacctataaataagaaatcgcaaatagatattaaaaatagatatctaagagaagaaatcggtaagaattccaaggaatataaagtaatattaaataaaccatcagatgatcttaacaaatattatgatagagtaacaagtaatgtagatgaagtaagaattttggatacagatgtagataagcttataaaagaatgcatgacgccatattttgatggtaaatcatcctatgatagtgccttaaaaaccttagaaaataaagttaaattatatataaatgaataatattaattagataaagggacgttttttactatgtcaaaaaggttgaagaaaaatttaattataacaggactaataatagctatatgtactgttgtaagtggatgttcaagtaattcaagtaaagatggtcaaaaagctgaaagtgttggaagtaaaaatgtaagttcaaataaagataatagtagaaatgatgaatatggcagtgataagcttggcgatttaagaggtatgtgtaatattaaatcaattaatggagatgaggtaacagttgatttgcagcaagaaaatcctaaaactcatgatgttagaataactagaaataaaaaaataaaaattacagatagcacaatgattatattgcatacttgctataaaggtagtaaaaatgttaaggaaagcaaattgtctaaaagtgatctgaagaattatcgctgctttatagcatggggagaacaggaaggagatatatttatagcgaaaaaaatacaaataactcagtgggggaattaataaagtaaattaagattaaaacaaccgaatgtttagagtaatgttgcagtaaaaagcattactctattttagtgtaatatatgtagacatgattataaatgtaaaattgtaattataagtaacatgatagaaaaatttatatttatatcgtaacgttaagttatattaatattaaatttgacactattataaataaattagattaggtttcgttgtatatgaaagaaggaaatgttaaatgaaaatgtcaaaaaagcgattagcaattattggtgttgtcatagttattattgttgcaataggcatgtatccagtatttagtaagaaacttttaaggtcaagtgatccaaatacattaactatttatgctttagcttataatggaaagcttaattatgatatagaggctattgtaaatggatttaagcaaaagtatcctaatataaaattgaatatagtaaaatttaatctcgatggtggtggatatgaaaaatataacgagaaaattttaagtgacaccttagcaggaggaggaccagatataatatattttaatcctgaggagactaatgcaagagcttttcaaaagtctggtatgcttgaagatttaaagccatatatagaaaaggataaagattttaataaagaagattataattcaaaacttttaaatgctgggatgtataaaggaaaattgacatttatacctactgattactgtattccatcttatataacaacaaaagagttacttgataaaaataatattaaaattactgaaaatatatctcaaaatgattttatgcagtcattgagtggatatatttcaaatgctaaaagtagcaatggcaaaacactttttgcaaaatcattaaatataggtgattttattgcaagtagtggttttgaatgcgtagattatgagaataaaaaaatgtattttgatacaaaagaattcaaagatataatggaaaattataaaaagatatataattcaacacctaagccagcaactagtgaaagtggtgaggaaggattacaaggaataaaaaatcgatctactcttttttcaacagatcagagttatacatgtggtgtagagttttttgaatctgagtcaacaataaaaggattaacaggacaaactcaggttataaatagctttccgacttataacggaggtaataaaacaattgcaattgcagaagatttaataggaatgagtaaaacaacactaaataaaaaggctgcttatgactttataaaaatagctttatcagaaaaaatacaatgtgataatagaggttatacaccccctataaataaaaaatcacaaatagatattaaaaataaatatttaaacgaagaagttggtaaaaatgataaagagaacaaggtaatattaaataaactgtcagatgattttaacaaatattatgatagggtaacaaataatatagatgaagtaagaattttagatacaaatgtagataagcttataaaagaatgcatgacgccatattttgagaataaatcatcctatgatagtgcattaaaaaccttagaaaataaagttaaattatatataaatgaatagataagaaaggagtaatatgttagctatcaaaagtaggtaatacattactctatttttacatcttaacgttatcttaatagtaagtttgataatataacattgaatttgcttggaggggagtggatggaaatacaaaatttaaatgtaaagaaaaaagaaaatataaaggggtatatttttgcggggccttccataataggatttttaatgttttttgtaataccatttcttataagtgtagtatattgctttacacaaggggtaggaggtttggatttcgttggattccaaaactttatagaattatttcaaaatgattcatttaaattggcagttaaaaatacaattttattcaatataatagccgtaccattggttttaattatatcgcttggagttactattatagttaataataaaataaaaaaagcatcattttttaggactgctttaactgtaccattggttattccagtggcatcaattatactagtttggcaagttttttttgctgaatcaggagtaattaataagattcttttaaaagtggggattatgggaccggattatcttaaaacgggatggtcattctttgtactggtacttctatatgtttggaaaaattgtggttatgacatgataatatttcttgcaggtttaaacaatatcccaaaagagtattatgaagctgcagaaatagatggatgcagtaaaatccaaagcttttttaaaataaccttacctcttttaatgcctacaatattttttgctttcataatatcaataataaattctcttagaatctatagagaagcgtatttactttcaggccaatatccagattctagcatatatatgcttcagcactttatgaataataattttgctaatttaaactatcaaaggctttcaacagcatcagttatagtttttgtatttgtcgcgattgtgatttattacctgtttagaattcaaaagaaatttgaggtgtagactatgaagagaaaaaataagacattaattttttttgagtatacaatattggttatttttgccatagcagcaatatttcctgttatatatatgatttcaagttcttttatgggtgaagaagaggttaaaaatgcacttcaaagctttaagtttcatattatacctgatgaatttacattgattcaatattataatagtttacttaggcagccagattttttattgaagttttggaattcggtaatattaacattacccacagttattggacaaataatagtatcaatttttggagcctatgcttttgctaagataaaatttaagtataaaactcaaatattttttatgtttataatacttatgataatgccataccaagtcaccttagtgcctatatacataattatgaaaaagttgaacttggtgggatcttatgcttcggtaatattacctggaatattttcaacttttggagtatttcttatgacacaatttatgaaatcaattccagatgagcaatgtgaggcggcgaaaattgatggagccaatgatatacaaatattatttaaaattataattccgcaatgcaaaggagcattagtatcacttataatactaagttttatagataattggaatatgatagagcagccacttattttactaggagataaaaaacagcctctttcaacatttttatcacagattaatagtggtgagttgggaatagcctttgcatgcagcgtaatatttatgataccttcaatccttatgtttttaaagggagaagatgagcttcttgaagggatacagcatttagatatgaagtaggggtgagatgtatgaaaaataaaaaaaataaagttgttactataagtattatagtatttgttgggattgttataatttgcacatatttttcaaagactataaaaaatatgcttcttcctgaagttaccgtttgttatgctaagcctggaactataggtgaaagttttgaaactacaggaacaatacaatatgaaaatactcataaaatatatccaatgtcaaactggcaaattaaacagatttgtgtaaagctaaatcaggatgttaagaaaggagatgtgttagcaaaggtagataatgatgaaatatcacttaaagaaaaagaagagcaagaagtaataatgcagcttcaggatgaaataaatagcttaaaaaaggcaccagctccagatcaagataagattaaagaaaatcaatataaattggatactgaaaatataaagtataaagcgataagaaaaggattaacgaatgatggcagtatactttctgacgtagatggtaaggtagtgagcataaattctcaaaatgggcaaagtccccaagatgctcagagcgatagttcatcaagttctcaagcaggagataatatacaagcagcaagcaatgctttgtttgaaataataagtagtgatgcaactttttcagtaaaatggacagcttcgacaaaagatgctgaaggattgtcaattggagatactgttaatgttacagcacaagatggagaaaattcaaatgctgaaacagcagcaatttctgaaaaaaaatacgattcaactaaagatgaatacgagtttttagctaccataagtggtaagagtgactttaaagaaaatgataaagttactgtaagtacccaaggaaatattaaaaaatataacaatgttattcccaaaagctgtttgtatgatgataatggagtagattatatttatgctgttaaagccaaagacggtgcactagagaatgaagaatatgttgaaagaattcaagtgaaagttatagattctgactcgttaaattgttcgattaaatcagtaaataatggtcagttggataaaagtaattacggaattgtaagtagttcatctaagtcaattaatgataattcagaagtaaagttggttactacggaagtatcgaggtgattaatgtgaatataattaagcttacaaaagttagattaattataggggttgtagttttacttactttaataatagcaagtaattatcttaactttagggttaatgatagtgtttcaaatgtaatagaatataagaatactgtcaataatgatggaattacctttgaggaatttaataagttaaaaaagcagtatagcgatatagatcttacttgctatagtgaagtaaagacaaaggtaacaaataaatatgatgtttcaccaagtaggtataataactttgctgataaaaaaataaaaacaaaaatgattttaactgatgaaaattactttagattgtatccttttcaaataataactggtgggaaacttgattttttatccgttaataataatgacaaggttgttgtaataagtgatgttcttgcaaatgctctttttaaaagtaataatgtaataggtagtactttgaaaattaataatgataagtacagaattgtaggagtttataaagaaaataattcattcttgtatagtatgtcagatgatggatatgaaaaagtatatatcccatatacagcttatagaagccaagatattagcaagctttttctaaatgtgcttacagcaaggcaaaaccctaaacatgataagaaggatataaactctaaattaactaaagttttaggggataagctatcagaatataatttagttgattatagtatgctaaaaggaattttatttcagaacgtaaaaatactatattttgtaatagggctttttgtaatagcctgcttgattaaaattatgataatgtttataaaagaagctaaaactttttttgtggataaaatgaagagtgactatttaaaagatgtacttattaataataaaataaaaatttccatttatttaggaaaagtacttatatgtatagtattgattgtatttgtatttaatttgattaaatttaatgttgttattgataaaaagtatttgccttctgaaaatatatttgatatagaattttataaggaggtaatagtttcaaatatacaattaaataatgcaaatgagaatggttttagaaatatatatgataggtatttgactactattaatcatgtagaaagttttatacttgtggcagagttaatattaattataaatatacttataaattataaattttttagaattttaaaaaataagtttaagaattaaaacctaggttttgattcttaaacttattttatttataaatgtaagcagttatattagaaatggaattatattgtttatgcaagtttaattccattcttttttacggtaagaatctaaaagttcttctatctttggagtgcaccttctaccagagcagccaccagaacctgcacctgtagctttttgaacatcttctacggttttagcaccctttcgtataactttttttatagttgaacgtggtattgccttacagaggcatacttttgttaatttatccataatttctttatttgcattattctccataaattaatcacaccttttaaataaattgttataggaaaaaattcaaattacgatgttttgactaaaaatccctatagctgcattataaatctattgataattattttcaactaaaaaactttattaaaatatattttctaaatttatctcctcgagactcgacacatgctctattaaaaaactcagtgtgtgtgatgattccatagcatcttttttttctttatattttatagcttgagataatctttctacctctaaacttatgtcatctacttccatgtggtggatgaaaactgataaaatacttgagtgtttataccagtctttttcaaagctttttaaatagagatctgccttggagtaggaaccgttttgcaatgaagtttgaattttattactaaggcttaaaaatttattacaggttttatttagatatcttattgagaaaaagcttaaaagtagaattactacaaataatgatacggcgacaactatgtttttcatgagtatcctcctagttattatatttttgataataaaatttgccctttgaatctattaatgccaaaaaaacatcctttggggaatctatcttattttttttaagttctttcataagccaatcggcatctttgttaaggtatttaatattatctgtattaacttttccatcaaggataatagttataggaacgttttcttgttttacctttaaatttaaatcttcctttgttgcatttgttagatgggttttgggtattaaagaaatttgtccactggtttcaagtattgcatactctatatcctccacattaaagtagttctttagtcgtaactcttccattaaatcatttatgtttaacctttgactttttaaagcactaatatcaatttttcctttatctattaaaagagttggctcgccagaaagtataatccttgctttttcactttttagctgaagaacagataaaactatttctaaaaataacagagttactatgggaattattccatatataaggggaattcttgtatcctgcattggaagtgaagcaagttctgatatcattatggtaattacaagctcaaaaggttgaagctgacctatttgtcttttacccataacacgcattgtcaaaacaaccaagaaataaagtattacagttctgagcataataatatacatataatcaatccttttcaaataatttatataattataattcctcaaattaacaaaaaatatgattaggaaatgatacatttttattaatttaaagtataatattatgagtaaaatatttatataaaggctaaattaggtatgggaggtgctaggttgagcagtattgagattaagttaaaggacggtagaagctttaaggttaatagaggaacgagtttccacgattttataaatcaaaataaactagaaggcgctgagacagcaatgcttggaagcgtaaacggaaatatatatgagcttacacataaattcagttactcaggaatttttgatataatagatttaaaaaatccaataggtattaaggtgtatgaaaggacattacaatttgtactagtaaaagcggtttctgatattttacctaatgcagttgttactatagagcattccataaataatggtatatttggtgaaatacacaaacaggatggggaattgacagaagctgatatagataaaataaagaatagaatgcttgaaatagttaaaaaagatcttcctataaaaaaggttacaatagataaagaaaaagcagttgaaatttttgaaaagtacggtatgaaagataaggtaaggcttttaaagtatgtaaaagttaaatatcttaagctttacgaattggatggaagatatgattatttttatggtgctatggcatattctactggcgcacttaaactatttgatttaaattactataagcctggttttatacttagaattccattagaaaaggatgtagataaaataccagagtaccgaaatcaaactaagctttataatatattctatgaaacagaacaatggggaaatattctaggtgttggtgatgttggatctttaaatgataaggttatgaaaaatgaaattaaggatatagtattaatttcagaagcactccatgagaagaaaatagcatatatagctgatatgatatccgaaagaaaagatataaagctagttcttatagcgggaccatcgtcttcaggaaaaactacattttctaagagattaggagtgcagctgagagtaaatggtttaatgcctgtggctatttcattagatgactattttgtagacagggataagacaccaaaagacgaaaatggaaactatgattttgaatctatagaggcacttgatgtagaactgtttaataaaaatttaaaggatttgatggaatataaagaaacagcacttcctaagtttgattttagaactggtaaaagaattattggaactgaaaaaataaagatgcctcaaaatggtgtgctaatagtggaaggaatacatggattaaatgagaagctgacactatatatagataaaaaaaataagtttaaaatatatgtaagtgcactaacacaattaaaccttgatgatcataacagaatttcaacaacagatgtacgaaagataagaagaattgttagagattacctttcacgtggatatggaggagaggaaacacttaagatgtggccgtctataaaaagaggagaggaaaaaaatatatttgtatttcaggaagaagcagatgttatgtttaactcaacgcttgtgtatgagcttggaatacttagaaaatatgcattacttgagctgtcaaaaataaagccttcaagtagcgtatattatgaagcaagaaaacttagaaattttcttaacttttttaaagatatagatgaaaaattggttccacaaaattcaatattaaaggaatttatagggggcagttgtttttacgattattagtttataaagaggtggcaaaagatgaaagaatttagtgcatttgatatattggggcctattatgattggaccttcaagttctcacaccgctggtgcagtaagacttggaaaaattgcaagtataatatcagaggaaaataatcctaaaaaagttactttccttttacatggatcattttcagaaacgtatagaggacatggtacagacaaggcattggttgctggaatattagggatggagccttgggatgtaaggataagagaatcctttgaaatagctaaaaaaaatggaattgattttgaatttaagccagcagatcttggagatgtacatcctaatactgttaaatttttaatacagaaaaaaaataacgaaacagttgagataatgggttcatcaacaggtggaggaaacataaagataatcgagataaatggcagtagtgtagagtttacaggagcgtatcctacgcttatagtatcacataaggatgttccaggaatgatatcaaagataacaactatgatttatgaaaataacataaacatagcattcttaaaagtatatagaagtagcagaggatttgcagcaaagatgattgtagagactgatacagtgattgataagcaaatcattgacaaaatgaagcaaatagaaaatttaaaaagcgtaatagttataaatccagttatagaaggtgaatagaatgtttgtggatagtggagaaaaactcatagaagagtgtacaaagagaaaaataagtatagctgattatacaatagaggaggagatatcaaaaagtcaaaccaattatgaatacgtattttcaaggatgaaaaagaatctagaagttatgaaatcggctgctgaatatggtactgaaaataaggttaaatccatgagtggattaataggaggagatggatttaaacttaacaattattcaaagaaagaggatacaattacaggaagtattatggttaaggccatggctagagcaattgcatgttcagaggttaatgcctctatgggaaaaatagtagcagcaccaacagcaggttcatgtggaatactcccagcagttattttaacagtaggggaaaaattcagcaaaagtgatgatgagcttacaaaagctttgtttactgcatctggaattggtatgcttatagctaaaaatgcaactttgtctggggcagaaggtggatgtcaagcagagtgtggatcagcggcagcaatgggtgcaggtgctgtagttgaaatgctgggaggaacgcctgagatggcacttgatgcagcatcaattgtaataaaaaatgtgttagggcttgtttgtgatccagttgcaggcttagttgaagttccatgctcaaaaagaaatgtttctggagcagtaaatgctataacaacagcagatatggtaatggctggagtaggaagtataattccttttgatgattctgtttcagctatgtatagagttggaaaacagcttccatgtgagcttagagaaacagcacttggaggattagcggtaactaaaaaagggcaagagcttaaaaataaaataatgaaatagatatgagaaaaacatatatttatataattcataatataatttaatgatagctattgtatgggtagtattaatttgacaaatagaaaggcaattgaagagtactgttgtgatttgaataagttatcggattttttgactcagtatgttagctcatataggcttttgataggaggtgcttgtgagttaaatcaaattacaccagcaaaaagaagtgatgttaagcatgcacttgaaagggttaacaaattaggagatataatagatgaacttatttactcaatagaaaagtgtcaatgtgaatatatagagtattgtgaaataaaatctaacgttattaaatgtaggattaagaagaagtgtatagaagaagagctaaatgataagtgtgatgaagtaaaaccacaacaaaagccgttataaataaaagtgagaatcttaataggcaattctcactttatttatgtttacaatttttttaattttaagttacttaccattagatatgataatataagcattataactattgttaaaacagcgtttggctgtgtatttagcagaaggtaaataagagaataaagagccataaacatacctgctaaagttattggaataccacgaaatactccgtcaaaagttgataaattgtagcgagctaatctataagcaccagctatagggaatatcaatacaaaaatatatcctaaaaaattaaaattagaactaaaattacataggtggtaagctaatattgaaggagcaacaccgaaggaaacaaggtcagcaagagaatcaagctccttaccgagttcgctcgacacattcaaagctctagcaactctaccatcgtatctatctataattccagctataagtatgaataaacatgccaatttataatattcattattagttgaagatgcagctaaagtcataattaatgataataaaccacatgataagttactaaaagtaaaaatatttgctactgaacttttagccatataaaatcactcctataatgttaataagaaattgtatataaacaagttatatttatataaacaagttatattatagcatacaaatgaattttttgataataaaatttttgtataaggcaaaaattgttttgaaaaacgtattattttactagttaatatgatatgattatttaatgtgtagtaggtgatttggagtggatagaatgaaagataaaacaaaaaagagattaatatatgccattatagcattaattgtaataattgctatattcgttgttgtaatagttaagcgacaatatttcaggcatagtggtagtattggaatgaagattttacatttaagacctcatgaagtcaagagatatatattaagttatggtccatattctagtttagtctttgtaataatatattctttaaagcctattttacttgtaatacctgtatctgcactttcggttatagcaggtggaatttttggaccacttaaagcattttgtctaagtatgcttggatgttttttatctggaagccttgcatttttccttgctagaaaacttgggagaccatttgtggataaaatattaaagggaaaagtaatgaatcttgataatagtctagataaacatggttttataataatgcttttaatgagattgtcattcgtttttccatatgatcctttaagttatgcagcgggattaactaaaataaaatatactgattttattttaggtagtttagttggagtgataccagaaatgatagcatattcagttatagggaaaaattttgaaaaaccattttcactaaaatttgtattgccaattttagtggtaatattagctgcaccgacagcattttttgtacataaaaagttgaaaaaaaaataaatataaaaagctttcctggataaactaatatcctgggaggtgtttattgtgaaaataagtgaagtaatgacaaagaacgtagtaagtgtaagtggagaagagaatattaagagagcagctgagctcatgagagatcatgatattggagctattccagtatgcaatagtgataaggttataggagttgtaacagatagagacatagttttaagaacagtagctgagggaagcgatgcttcaagtgagaatgtaagaagtataatgacatctactcctgtagttgctagtcctgatatggacgctagagaagctacaaaaataatgagtgagaagcaggtaaggagacttcctgttgctagagatggaaagcttgttggaatggtttcacttggtgattttgcagttgaaggcagtaccgacaattgtgctgaaaaggctcttagtggcatatcaagtccttgttgccctaaaatataagtatgactttataaatttattcattattgtgcagacctgtaatcgtataacgtatataaaaaataggtgtttttgtttttaaaataatagaaatgtagcgaatttataaatccacaagatggtattctaatcttgtggatttattccaataaatgatataatataataatgtagtattgtattggtattattattgatttgaggggagcatatacgataatgaacaaagttaagtttatttacaatccattttcaggagaaaatttaattataaataatatagataaagttataaaaacacatcaaaaatatgggtacacaatagttccacatagaatagaattaaattgtagtatagaaagtgctttcgatgatatagatgatacatataagtatgttcttatagctggtggagatggtactgtagataatgtagttaatgttatgaaaaagtgtaatttggatatacctattgcaatacttccagtaggtactgcaaatgattttgctaaatttattggaatgccagctgatattgaaatggcctgtgaacaaatattaaatagtgaaataagaaaaattgatattggaaaaataaatgataagtattttatcaatgtagctagtgcaggattatttactaatgtttcacaaaaaacagatataaatatgaaaaatacaatgggaaagcttgcttactatgttaaaggaatagaacagctgcctaattttaagagaataccattaaaagtagaatcaaaacaaaataattttgatggggaaatgctccttatgcttgtttttaatggtcaaacagcaggtaactttaagtttgcatacaaggccattgtagatgatggtatgcttgatgtaattataatagagggcggaatggttaaagatatagtaaatatactaatcaagatgtttaaaggggagcatcttgaagatgtaaacggaataatatattttaagacagataagcttaatataagttgtaataatgatatagttactgatatagatggagaaagaggacctgattttcctgttgaaattacatgcataaaaggcgggcttaaaatttttggtgtaaagaatatttaacaaaattcaggagtaataataaatataggttttcatacgtgaatttaattttggtacatgttatttgcgtagaagccctaaatagcactcagtggagggataaagtgtttgtttatgcctatatattaatgttattgcttactgttcttatgtgcataaatttgtttatagatagttttaaatgtcctgtgaaaataagaagaattcttagaggattagtgtttctaattatgttaaggtatgtaacattgcttatcatgtgcttgaaaaaaagtataacatacatatactttatgaggcctattgttttattagatatactatatataccgcttgttatattgattatgatttttgtttttacaagaagtgctaagtttaacttcgtatatgcagcaataagtgggattatattttttagtttgtatatttttttgaactttaaaatactaaaaaccgcaaatcctttttacagttatagctttggatatttaattgatttaaagagctatagtgtagtagttgcagtagttaaagttatggtgcttattttaatgcttatgctatgtggctacttcttaaggaaaagcaacataaggagagctggattctgttttttgatgattgtaatcttagtcatgctagtagaaaatatatctataattattatgccaaaggttatgcctgaatatttatttggagaagttttgcttttgatttgtttaaactatatggttaggttatttaaaaaataatctgaaatacgaaaataggttgatggattttattcttacttccatcaacctattttatatattattaaaagttattctttatcatcttgaagtgcatcgtaatcttcttcaccagttcttattttaactactttactaacgtcgtatacaaaaatttttccgtctccaatttttcctgtgtttagaacatttttggctgtctctaccaccttttcaacaggaactgagcatacgactatttcaacttttattttaggatttagggttatttcaacaggatttcctctatagtactcaagagtacccttttgaagaccacatccgagtacgtttgtaactgtcatacctgtaactccaattttgttaagctcacttttaagttcatcgaatttttctggtcttgtaactatgtcaactttgctcatcttgtaatccataaatgttcatctccttaaaaataaaatataacagcatatatataaatatactactttagagattaaagttccatattataaaactataaagttaatgaaaattacatctaaagtagtatgttctgaattttaatctatgtgataagctctttctccatgtatagagatatcaaggccttgaagttcttcttcgtcagtagaacgtattttgaatattagagacaccactttaataattattattgtcccaattatagaataagcataggtagcagcagttgcttcaagttgtttcaaaacaagagaagcattgccataaagaagtccatttgcaccagctgaattaacagcttttgtagcaaatattccggttgctatagcaccccaggtaccaccaataccatgacagccaaaggcatctaatgcatcgtcatagttaaatttctttttaaggaagctaactgagaagaagcatataattccgccaataatacctataactaatgaagagccaactgttacaaaaccgcaggcaggtgttatagaaacgagaccagctaaagtacctgttagggcacctaaaaccgttggacgttttgtaataaaccattcacaggtaatccaagcagcagcagccgcagcagcagcggtatttgtagttataaaggcattcatagctacatcgtttatagctaaggcacttcctgcgttgaaaccaaaccaaccaaaccataaaagcgtaccacctataaaggttaaagtaagattgtttggagaggtttttatatattttctctttccaatcattattgcagcaacaagaccagaggctccggaacttatatgaactacagttcctccagcaaagtctaaagcacctaaatttttaatccagccaccgttaccccatacccagtgtgcaagtggatcgtatattatagttgtccaaagaagtataaaaagtataaatgcgggaaattttattctttcagcaaaagcacctgtaattaatcctggagttataattgcgaacattaattggaacatcataaataggctatgaggaatagtgcttgaatatggtgcaaaaggtttaaaacctacatgatgtaaaagtgcatattggaaatttcctataaggcctgaaatatcagggccaaatgcaatagaatatcctattaaaatccattgaagggatactataatcatacaggcataactgtgcatcatagtacctaaagtgttcttggttttaaccatacctccgtaaaacattgcaagagcaggtgtcattatcattactaagactgtagaaagaaatacaaaagtagtatctgcgaaattcataataatagcctccttttttaaaatcttcgttaataagtagtccaatattttataatgatatcaaagataaataaaaattgcaagtttattaaataaataagtcctaaaatgcaaaaaaaataataaagagcccttaaattttaaatatcgtattttttaaacaagtaagaatgctcgataaattatttttttaataatcaactttaataagtttttaattttaaggttgaaaaattcacattttatactataattaaaagtatagagcagatttaaacaaatatgttgttgtaggacattctactgtactgtatcttattaaagatatggtgtttagatgttgtaatttaaaattaacagtatatattttctgctttaaataataatataataagaagaaaagttttagttaggtgaggctcctatatagatatacgctactgcccagaaacatcgagagatgccaaattgggtcagcagatattaccgaatcaaggttctatctaatgtagctggatttatagttttaatctaagctatatagtgctaaagctctactgtctaatttcgtattagagtttatgagtgagcctttgatggcttttttttattgtaaagaggagtgagtttttatggaaagtggccctcatttaagcgaggacgatctgaattttacaactgaagagaaatttgaggaatgtttttcatatataacttgttaatatagatatatacgattccaatctttctcttcaagctaaattagagaacataactgtgtattacttgccaagaattagattttatttaggtgaagtatttcagtaaagtttgaaagggatgattggtgtgcagaaattattaaataacttttttttgagtgaagtactttatagaaaagtatatgacgaatatggtgaatatgtaggtaaattatgggatatatatgtcactgctgatgaatcatatcctagggcaattggatataagattaagaagggcggagaatatatcaactatgaatttaagtcaatacatttttacagggaagatgaaagtagaaaaatttatatgcaggttaaagcagtaaaggatactataatgagaaaatactcatatttactctctaaaaatcttttagataaacaaatagttgatataaatggaaagaagcttgtaagagtcaatgatttaagaatggctaaaatggttggagaacttaaagttatacgcagttgatacgggctttatggcattaagtaggagacttggagttgaaagaattatatggggtttttataaattaactgaaaaaaagcctatggaaaattatataatgtggaacgatgtagagtctttagaaatggttaatgataatttaaagttgacagtgccttatcaaaagctttcaactatgcatccggctgatttagccgatataattgaagatatggattttaattatagaaaaaaggtttttgaaagtcttgatgaaaatttagctgctgacatactagaggagatagacccagatattcaagcggatatacttgaaagcctaagtgatgataagaaaagtgaagtactagatagtatgcctattgatgaaattgcagatatcttggatgaagttgatgaagaaactgctgaaaagatattgcttaatatggaaaaggaagatgcagaagaagttagagcactcatggggtatggagaagaaaccgtgggtagtataatgaacaaggactttatttcatttaatgtgaatataacgttgaatgaaactttagatataatgcgtgaaatgaatcctgaggatgaggtaatatactgtatttatataacagataatgaaggaaagctagaaggctatgtatctcttaaggatttactctttatgccaccagaaaagaagcttaaagatgttatgaataaaaagattgcttttgtaaaagattcagataaattagaggaagcaatagaaacatcatcaaagtacaatcttatttctcttccagtagttgataatgacaacaagttatgtgggattatattagttaatgatttaattgatgaagtactcctaccagcgtggaaaaagaaatttaaaaaagttggctaagaaggtgagcatatgaaaaaaaaatttagtagactactgtttatttttagtatagttggaccggggcttattactgcaaatgcgggtaatgatgcaggaggtgtgactacctattcagtgataggctctaagtatggatattctatgctttggggattgtttgcaatcggcataggacttgctgttgttcaggaaatgaatgctagaatggcagtagttaccggaaaaggattatctgatttaataagagaaaggtacggcgtaaagttggcattctttgcaatgcttgttttaatgatagcaaatctaggggtttgtatagctgattttgctggaattgccgcaagtttgcaattattcaatataaataaatatatatctgttccaatacttgcaataatgatatggattataatgacaaagggaaactactcaaaggctgaaaaagtatttttgcttttaactcttactttctttgggtatgttattacagcctttatgctaaaaccaaattggtctaatgtgttttcacatatatcaaatccaggtggaaccttgagtaaaaattattggcttgaccttataggaatggtaggaacaacaataactccttatatgcaattttacttgcagtcttcaattgtagataaaggaatatcattaaaagaatatggttatgaaaagcttgatgtttatttaggtactgtatggggaattttaactgctttatttataactatatgtacgtcagaaacactttttaaagctcacatggcaatatcaagtgctcaggatgcggcagcggctctaaaacctcttgcaggtcaatattcatttgtgctatttggtgtcggtttgtttggagcatcttttctagcttgctgtattataccgctgtcaacatcttatgcggtatgtgaggcctttggctttgaaagtggacttgataataagattaaagaggcacctgtgtttttcggattgttcttttttatgattataacaagtgtaattatagttttaatgcctaatatatctttaataagtataatattgtttacacagcagttagcaggggtactatgtcctgtagtgctaatatttatgataaagcttgttaatgataaagaaatcatgggtaagcatactaataataggcttcaaaattttatagctaagtttacgatagggcttataattatacttacaatactagcttttgctggaaattttgtatagattattatttatatatgcatgaatctatttagatacagattcatgcatatatttttgtgtaaaattataaatagttgtatttgaaatttagtacttttatactccttgatattaaattaattataatacaaataaatatagataaataaagtttttagtattaaaattttatttttgaacaaaatatctttgaaatgatttatatatgaaatctagtttaactactaatttatcagtagagtctttagcaaggtaggttagttttaatattagatttctatgaataaagactatatttatttggcggaggtaaaatttatgaaaggaattttgaagtataaaagaagtatagtacttagtttagctgtacttatatcatatctgagtatctatgtgtggcttctgccttataataatgcagtaaatgccattacatataagtacggatcaaatggaagtggagtaattcaaattcaaacaaaacttaaaaattggggttactacacgggaaaaatagacggagtatatggatatcaaacctatacggcggttaaaaagtttcaaacaaagaatggtattttgccagatggaatagttggaactgctacgtcagcagcacttggaatgacaactacgcagcccactgttgcatcaagcagttattcaagctacaatcaaaatgtaacccttttggcaagacttataaatggtgaagctagaggggagccatatgcgggtcaggttgcggttggtgcaacggtaataaatagaactaaaaatcctaaatttccgtcaacaattgcaggagtaatatatcagccaggagcttttacagcgatagtagatggtcaaattcatgctaccatggaacctaattcaataagagccgcaagagatgctttaaatggttgggatccatctggaggagcaatctattattttaatccggcaacagctacaagtggatggatatggtcaagaccacttataataattataggtaagcatagattttgtagataaaatcatgttgacaaaaactaaataatgtatataataaaattagaattaattcttactaaaatagtcagaaatgctttgataaagtaaagtagtatagtgaaagttttaagagagggaatgttagctgaaaaattcctaaatggaagctgtatgaagtgcgctttggagtacatcatttgaagtatgagtaggatgatgcggtaatacccgttatagtatggagcattatatgtgcttttgttttagagtggaatagcgagtaagtatgacttcgtctctagtgagagacggggtctttttttataaatatagttttttattataaggggtgctaagatgtttaagtcaataaggtatgatataaatagagttttgcagaatgatcctgctgcgaggaacggacttgaagtttttttgttgtatccatgtatacatgcacttatttggtatagaatagcccacgttttttataaacataagatgttttttattgcaagactattatcacaaattgtaagagcttttacaggaatagagattcatccaggagcgactataggaaaaggactttttattgatcatggtatgggagttgtaataggagaaacagctgaaataggtgataatgttgttatgtatcatggttctaccttagggggaactggaaaggaaactggcaagagacatccaactgttggaaataatgtgtttataggttcaggtgcaaaggtgttaggaccaataaaacttggtgatggatgtaagataggtgctaatgctgttgttcttaaagatgtaccttccaatagtacagctgtaggtattccagcaaaagtaattttgcccagtagtaaaaaagaaaaagtaattgattttaatgattattgcaataaataattttatgtatataaatcgggatggtttctgctgtttcgatttttcttttatataagatttgtaattgaaaattgtaccgaattttttacggtaatatattaaagagtacatatatattaagttttacgcttgggttttatatggataatcgttatcattagactttttagatattttacactataataggttttgacatatataaaaattattaatgcaaatttttaagttaatgttttgaaaggtggaattttatatggtttctcctgtagtagctagaattattgaattactaccggattcttgtgttggttttataggtaaaagaattttaaatatgtatttaaataaatatgctgatataaatgttcatggcatggaaaatttaaagggaatagataagccaattatgtttataggtaatcatctaagtaattctgatggacttgttcttaacaaggtattgaaggattacgatgttacttttgtagcaggtgttaagttaaaaggagatgctattactaatttaggtacatattgtgttaaaacaacagaaataaagcctaatacagctgataaagatggtatttatagagttatagatatcttaaagagtaatcataatatactaatgtttccagaaggtactaggagtagaaccggagcaatgatagaagctaaaagagggccgttatttatagcaaagctaagtaaggctattatagtaccagttggtatatgtggaagtgaaaaacttcttcctattaataaggaaggaaacatgagtaatgaaaattttcatcatgctaaagttgaggttaatataggtaagcctttttattttgataaaaggatgaaggaagaaagcaagaaggactacgagaaaagggctcttgataatgctatgtataagatcgcagaactaatacctgaaaattatagaggagtctattctgatataaagaaggtgctttaaatagagaaagaaaaggtaaataaaatagtagatatactttatgaaatgtatccacaagctaaatgtgcactggatttcaaaacgccctatgagcttttgatagctacagtattaagtgctcaatgtacagataagagggtaaatttagttacacaagagctgtttaaggaatataatactccatataaaatgtgtgagcttacagaggaagagttgcaggagaaaattagaacttgtggactttataaaaataaaagtaagaatatacttgaggcctcaagaggacttattgatagatttaatggagaagttcctagtaatatggaggaattaacaagtcttccaggagtggggagaaaaactgcaaatgtggttatgtcaaatgcattcggaataccagctattgcagtggacactcatgtatttagagtttcaaatagaattggacttgcaaaaagtaagaatgtgtatgaaacagagaaacagcttatggagaatatagataaaaaagattggtctacaatgcatcatgctctaatatggcatgggaggcaaatatgtaaagcgcgaaggccggattgtgaaaaatgtgggttaaaagaagtatgtaattactttaaagaaaacaataaataaaaaagtactgcaaagcttaatttatatagccttgcagtacttttttattcagatgtacagtaatttataagaagatctaatgttgctagcataccatctaaatgagttctttcgtagccatgtgaggcatatacgccagtgcctataagagctgtttttatatcgtatccgctttttaaagcagcagatgcatccgaaccatagtatggataagtatctatcctatatggtatatttttatttttgcatatatctaccagtcttttcctgaatgcataatcgtaaggaccagaagaatcttttgcacatatacaggttgcaaattcagaagagttttgaccttttcctggagctcccatatctatacaaagtaattctttggtattttgagggaggtttgaggcaccatgcccaacttcttcataggtactaaaataaaaatttgttgtgtacttaagctcaatgttattgtctataaaatgctttatggcgtagagcattatggcagcgctagccttatcatcaagatgtctgctttttataaaaccactatcagtaaattttattcttggatcaaaacatatgaagtcaccaacgttaattccaagagcttcaacatcttccttagaaaaaaccttttcgtctattacaacttccatattttcaggtattctttttaactctttggcatcattgtggatgtgaacagatggtttggttgattgtattgttccagtatattttttgtcgtcaagtgtcattatgttgcaattttcgccttctattgaattcatcatataaccacctataggagtaagtgaaagagtaccatttgattttatctctttaaccattgcacctaaggtatctagatgtgcagaaattgttctttcgaaggaactattttttccaggaagggttgccattatattacccttatttgttattttataatgaactccaagtttacagaactctttttcgatatagctgactacatcatgagtatagccagaaggactatttatttgtagtagattttgtaaaaaaactgttaattccttagaattatgcattgtatcaactccttagtaactattttacacaacgaaaataaaattttcaaatatttataatttaagagaatactaattgtatattttatagtataattgtaaagaaaataaaaataggtgaccttacaccagaggagagttctatgaaaaaagtagtaataggtgcattttcaagtgcaataattataattttaatagtattgagcagcatttatataaaggttaaaaagtgggatggtcttgtatatagaggggttactattgatagagttgatgtatcatctaaaactaaaaaagaagtccaagatattgtaaaaaagaaattcgataaaatagtacaaaatagaaccattaatatggtaacagatgataataagacaataccgcttaagtatagtgatataaatgtaaaatatgatattgataaagctgttagtggggcatttgattacggtaaaagcttaagcatctatgatagatataagcttcttcataatcctaaaaagctcgaaattagcgtaggtatgacctatgataaaaatgctcttgaaaattcaataaagaatttaagcaatactttaaataaaaaagccaaggatgctactatagtaaaaacagcttcaggatttcaaataactccagaggctgatggaaaaaaagtaaatgaagataagttaaaagctgatatagaaggcaaaataacggataataatataacagactataatgtaaaaataaatatggatgctgttaaggcaaatgcaacgcaggacaagcttaaaggaatcaatacgcttataagttcttttaatacagaatatgcatctttatcaagtcctcagcgtgcaaataatattacacttgctacaaaagctataaatggtattgtgcttatgccaggagattcttttagctttaatggagttgttggggagagaacagctgcaaaaggatatcaatcagcaccggttttgataggaaataagtcagatatgggacttggtggaggtatatgtcaagtatctactaccctatataataccgttttaacatcaggaataaaagcaactgagagacatcatcatacgctgccatcacactatgttcctgttggatatgatgctactgttgattatggaactttagattataagtttaaaaatacattaagctttcctatatatatagagggaaatacagataatggacatgttacctttaatatttattctgatgcgagtcttctttctaagacctacaaggtgagcagcgaaaatatttcagattcggttcctaaagcaaaagtttatttggaaacttatgaaaatggtacacttatatctaaagatatgattgcaaatgatgcttatagtaagtaaaaaaattgaaattttaaaattaaagtagtataatatagtgaaatagcttaggtgatgagtgattttactatgagcggatatggcggaattggcatacgcgctagtttcaggtactagtgagaaatcatgcaggttcgaatcctgttatccgcaccaaattaagaacagcacccaatagaatttttaagtggatttgagaattttattgggtgctgttttgttattgacatatataaatattttttaattatattgaactagagttgtgcatacgttaacaattatacacataaacaataatgtgataacgtttactcaagacgatttaaataaaaatttataagaacagaattataataatggaattttaatagttgcatgtaaataaatgttaatttatgtgatatttattataataagactctaaaagttgatttttttatttgtaagtaacaatacataattacaaaagactgcaaaaaaatacattacacttaaaaaaatatattattgcctattttaaagtataaaatttaaaaatagttgttcacgttcacaaaaaagtcttgatatttaaaattattggtatataattaaagtagggaacctgataacgttaccaggtttgcgccattatccgttatttaggaaggggaattttcatgaaaaattttatggatgaaaaatttatgctgtcaacaaaagtagcagaagatttatacaatgattttgctaaagatatgccgataatagactaccactgtcacataagtccgcaggaaatatgtgaaaataagagcttcaaaaatataacagaagtttggctttatggtgatcactataaatggagacttatgagaagttctggagtggatgaaaagtacataacaggcgattcatctgattatgaaaaatttttagcatatgttaaggcaattgaaactgctataggaaatcctctttatcactggtcacatttagaattacagagatactttggtgtgtatgaagttataagcgagaaaaatgcacctgtaatatgggaaaaagcaaacaaggttctaaatgatggacttactgttagagaaataattaaaaaatcaaatgttaaagcaatttgcacaactgatgatccaatagattcattagaatatcatttgaaacttaaagaggatacaagctttaatgtaaaagttcttccagcatttagaccagacaaagctcttggaataaacaaggatggatacactgattgggtaagtaaattagcaaaagtttcaaagaaaaatataaatagctatgacatgttcttagaagctcttaatgatagaatagagtttttccattcagttggaggaagagtttcagatcatgctttagattatgtaccttatttagaagcttcaaaagaagaagtaaatactatatttgctaaggctttaaagggagaaaaagttagttttgaagaggaaactaaatttagaacattcactatgaaattcttaggtaaaaaatatgcaagcctaggttgggcaatggaacttcatatgaatgctaagagagataacaacactcgtatgtataacaaattaggacctgatacaggatttgactcagttaatgataatggagttgctggaccactttcaagattcttagattcactagaaaaggaaggttcacttccaaaaacaataatttacagcttaaatcctaatgataattttgttattggaactttacttggatgtttccaaggaactgaggcatttggaaaaattcagtttggagctgcatggtggttcaatgaccacagggatggtatggtagagcagatggaaacacttgcaaacctaggagcgtttagcacattcattggaatgcttacagattcaagaagtttcttatcatatactagacatgaatacttcagaagaatactttgtgatttaataggaaaatgggttgaaaatggcgaagtaccaaatgatatggagttacttggaagaataacaaaaaatatatgctttaataatgctaataattacttcgaaatgggactataatcattccattttattgtaattaaaaataatatagtttatttagggactattgtgttatattatgaatatgctaatatgtttatgaggaagccagtttactttcttaagttatattatgataacttaagttttattttggactcctaatacttgaaaggtgtgttgtaaaatgagtgttacgataaaggatattgcgaaaatagcaaatgtttcgcatactaccgtttcaagggctctaaacaatagtcccgtgataaacgaagaaacaaaaagaaaaatattggaaatagccaaaaaacttaattatgttcctaattttaatgctaaaagtttagtgttaaataaatcttataatataggtcttttcttctcaagcataagcaaaggtacttctccaagcttttttcatgaagttgtagagggagtaaatagtattatagaagaaagctataatttggttattaaagggatagataattgcaatgactttaattacatatctaaaaaaagattcgatggaataatattggtaagtcaaagtgaaagtgataattccttcatatatgatgttattaataaagagatacctatagttgttctaaatagagaaattgaggaacaaaatgttataaatataattgcagcagaaaaagatggtgcatataaggctgctgagtacttgattaaaaatggacatagtaagattgcaattatagaaggtaaagctggttttaaatcatcagtatatagaaaaatgggatttattaatgctttaattgataacaatatagaaattaaaaatgaatattttcaagcgggaaactatgatgttgaaagtggtttttctgccatgaaaaagtttttaaaattaaaagataggcccactgcggtattttgctctaatgatgatatggcagtaggagctgtaaaagcaattgagcttgaagggctacgagttcctgatgatatttccttagtaggatttgatggtagtatattctgcgagtatgttactcctgcaataactactattaggaaaccatcaagagagattggcatagtaggtgctaataaaatgcttgatgtaatagacgaaacagaatttaataaaaagaagatttatataggtacagaactcattgtaagagattctgttaaaaatttaagtaagtgatttggctaggaagaaactatgtttctaataataattggaggattgtgtcatgaaaaagttaagcttaaaggaaaaaatctcttatggacttggcgattttggaaatggtttcatgtttgatttgggtcaatcatatctgttaaaattctatacagacgtcgtaggtatagctgcaggagcggcgggaggaatattcttcttcactaaaatatttgatgctttcatggatcctatagctggaacaataatagattcaaggaaaccaggtaaaaacggtaaattcaaacctattatgttctttgcaagtatagtacttgctatattgacagtaataacgtttactaaccctggaaaaactgctacatcaaaactattatttgcatatgcaacatatatgatatggggacttggatactcatttacaaatgttccgtatggatctcttggatcagttataactcaagatgttcaagaaagaacttcgttggcgacttttagacagataggttcttcaggagctcttcttataacaagtgttatatttatgcctcttgttttagtatttcataacccagcaataggttatccagtagttgcgggtataatggggttaataggaatattatcattctacatgacatacaaaaatactagagaagttgttgcgccagctgaaaacgttaagaaggaaaaaataacaccaaagtcaattgcggttacaatatttacaaatagagcattattaacattaatattaatgactatattctctatttcggcttacaatattagaagttcattaattgtttattactgccaatataatcttggaaacgttactttattaccatatataaatttcttcactataggatgtgctgttttaggtgtttctttcatgccaaagctagttggtagatttggtaaaaaaagaactgctatcataggatttttgataagtgttattgcagatagtataaactttcttcttccaggaaatatatatactttcacaatattattagcaattggatttataggtataagcattcctaatggaataacttgggcttttgtatcagacagtatcgattatggtgagtggagaacaggaactagaagagaaggaataacttactctgtatttaatttcgcaagaaaacttgctcagtcaatagctggattattatcaggatggggacttggatttgttggttatgtagctaacaagaaacaaagtgcacatgcattatttggaataaaagcattattgatggcttatccagcggtagcgcttttagtagcagcattaataattggtttattgtacaacctttcagataagaaatttactgaaataatagaagaattagacgctagaaaaggtaaaacagtttaaattttataatttaaatgttcacgtgttcaaaatgtggtataatataaaagaatacaattttactatgaaaaatataagaaaacaaaaatgccaatatcatttttgaacacgtgaacgtaataagaaattaggaggaacaggtatgaaattaaataggagtaattttagtgaatttaaaaagtatcctgaaaagatcctacagttcggagaaggaaactttttaagagcttttgttgattggcaagttgacagaatgaacaaagcagcagattttaatgccggagtagttatagtacaaccacttgaacagggtttagttgatatgcttaatgaacaagatggattatatacattatacttacaaggtttaaaagaaggaaaagctgttaaagaacattcagtaatagactgtgtaactagaggattaaatccatacactcagtatgaagaatatcttaaattagctgagaatccagaaatggagattgttatatcaaatacaactgaagctggaatagcatttgatgaaaatgataagcttggaaggacctgtcagaatagttatccaggaaagttaactgcatttttatatagaagatttaaaactttcaatggtgataaatcaaaaggtatgctaattataccttgtgagcttatagacagaaacggagaaaaattaaaggcaactatacttaagtttgctgaactttggaatttagaaaaagaatttgctgactggatagaagaagctaatactttctgctgtacacttgtagatagaatagtgccaggatatccaagagatacaatagaagaagttcatgcagaattaggatatgaagatagtttagttgacgtaggagagcaattccacttatgggtaatagaaggacctgaatggataaaggatatactaccttttgaaaaagcaggagtaaacattcaagtagttaaggatgttacaccttatagaacaagaaaggttagaatattaaatggagcacacactgcgttagttccagtagcatacctttatggattagatactgttggacattcagttgaggacaaggttattggaaaatacttaacagaattagtatatgatgaaataataccaacactagatcttccagaagaagaacttaaatactttgcaggtgctgtacttgaaagattcttaaatcctttcgtaaatcattatttaatgagcattgctttaaattcaatgccaaaatttgaaactagagatttaccttctcttcttgaatataaaaagagaaaaggtcagcttccaaagaaacttgtattctcacttgctgctcttatagaattctacaagggaaaaagaggagacgaggatataaaattagctgatggagaagatattttagagttatataaagacttatggtcaaaatttgatggaactgatgcttgctacagaaatatagtagaaacagtattaggatatgaaaagaactggaaaatgaacttaaatgaattagaaggcttaacagatgcagttactgaaaacttaattaaaatagataaattaggaatgaaagaggctgtaaagtctgtaatgtaatataggtggaggtatatcttcatgaaaaatgttataaagataaatgaaaaagataatgttgtagttgctttaaatgatttaaacaaaggcgatgtaattgaaatagatggaaaagtaattacagcagaagagcctgtaaaaaaaggtcataaaattgcaattacagatatacaaaagaactctaatatatataagtatggatttcctattggtcatgcgttagaagaaataaaaaaaggtcaatgggtacatactcataatataaaaaccaatttggatggaataaaggattatgagtacaataaacaaacttttgagaatccatttaaaaatgaaaatttaacttttaagggttatagaagagaagacggaacagtaggaataagaaatgaattatggatagttccaactgttggttgtgtgaatggtacagctgatttaatagctgaaagatttaaaagtgaaactgagtttaaagatgtacatgtatttaagcataattttggatgttcacagcttggtgatgatcacaataacacaagaactatattaggtaacattgtaaagcatcctaatgcaggaggagtattagttcttggacttggttgcgaaaataatactatggagagtttcaaggaatcacttcatagctacaataaagaaagagtaagatttttaatagctcaagatgtagaagatgaaatatcttccggatgtgagttgttaaaagaattatatgaaaagatacaaaaggatgaaagagaagaggtatctatttcagaacttaaaataggacttaaatgtggagcatcagatggtttttctggaataactgcaaatccacttttaggaaagttatcagactttttaatagcacagggtggaacaactatacttacagaagttcctgaaatgtttggagcagaaacaatactcatgaatagggcaaaagatgagaaagtatttgcaaaaacggtaaacttgattaatgattttaaaaaatatttcatgagctataatcaacctgtatatgaaaatccttctccaggaaacaaagcaggtggaataactacattagaagataaatcattaggatgtacacaaaaatcaggaagctctgaagtagttggagtacttaagtacggagaaactttagaaaataaagggttaaatcttttaagtgcgccaggtaatgatttagtggcatctactgctcttgcatcggcaggatgtcatatggtgttgtttacaactggtagaggtacaccatttggaacttttgtgccaactgttaagatttcaactaactcagatatatataataagaagaaaaattggatagattttaatgcgggtgcacttttagaaaatcaatctatggatcaagtgcttaaagaatttattaattatttactcggagttgcaaacggaaatatggcaaacaatgagaaaaataacataagagaaatatctatatttaaaaacggtgtaacactataaaaaacaacgacgctgactaacttctaaaatatgaagcttatgaagctgcactataaatgatgtagttgcagtttcataagctatttaaaattggagatgatagcaatgaataataaggatttgtggataaaagaagaaattatatggagtgagcataaatgtatacgttttgctgcaggtggatatgaagcactaataatacctgatgtaggtggaaatgttgttgaattaaaagatactaataagggtgtaactattcttagaacaccaaaaaaagatttgaagtttgaagattttaaaaatagaccacaggtttatggtcttccagtattatttcctccaaacagaatagatgatggtacttttaaactaggagataaaacatataagtttcctataaatgaagctaaaaataataattatatacatggatttataaagaatagcaaatggacagtacataaaaagaaaatagatcaggataaagcattagtagaggtcgtttttgattttacaaaggaaaatgaagcttataaatatttttctcatgaatttcaatttaaattaagttatgagctttcgagtaaaggattaaaacaaactacgagcgttgtaaatttaagcagcgaagaaatgccattatcagttggatatcatagtgcatttaatgttcctttcatagaaggaagtgaagacagtaactgtagggttaaaatttcaatcgataagttctggaaacaggattcaagaaatcttcctacaggagaaagttttgcacctacaggagaacaaaaagaatatttagaaaatggagtagccgtagcttcacatcctatagaatctttattttctttaaaggatattgatgttaatggtaagacttttagaggagcatgtatagaagatgcttcaaagaatacaagagttgtttatgaaatgagcagtgaatataaataccttgttatatggaatgatatgggtgataaaaagtatgcttgtatagaacctcaaacaagtattataaattcacctaatgtaaaattagatagaagtgtatctggttttaaaactcttaagcctaatgaaagctggagtggagtttgtaaattatatatagagaatatgtaaaactaaaataatattagataagtaaataatcaaacgcgaaagatgatttttttaaaaagcttaagaaatcatctttttctttgttataacatgatataactaattaaaaaaatgtgataaaatgtagatgtgtttggagaatatgttctaaattaaggagagattatatgaagtataaattaatatgtgtagatatggatggtacggtacttgatgacgaaaaaaaaataagcaatgaaaatatagaggcaatgaaaagggctcatgatgcaggagttaaaatagcaatttgtacaggaaggctttttgcaagtgcgttagcatattctgatatattaggagtaaaagctcctttaatagcttcaaatggtggctatataagggaaaaagataatgacaatgttatatacgaaagctatttgaaaaatgaggaagcgaaggatatataccatataatagagaaatacaatgtatctatgtttttcaatacctataatacggttatatcaaataaagaatttgaagaaaactatacatataacaaatttaacgataaccttccgaaagaaaagagagtaaaacttgtttatcccaaaaatatggataagtttttagaagaaaatgttggcgaaatattaaaatgtatatgtattgacaaagatgtagaaaaacttaaattgctaagaaaagagatagagtctcttaatagatttgatgttgtaagttctggtgaatttaattttgaaattatgccaaagggtgtttcgaagggaaaggcagtaaagatgctcgctgctttttacaatataaaacaagatgaagttatttgtattggtgacaatgaaaatgatctttcaatgataaaatgtgctgggattggtatagcaatgggaaatgctgaggatagtattaaacaaattgcagactatgttacagatacaaataataattctggagttgcaaaagccatagataaatttatatttaatgaagaatagtcaactaagtatattgctgaagttttagtaaatactacctgtaagaggtggtaatatggaaaatatgtttagaagagttatatttgaaaagaaagctttagattatccaatgggacgtgatattttaaggcaatttgaaaatacagatatagaaataagatattcagaaacgggaagaataactggaataccaggaaaagatgaggcgcagtctttttttgaggggaaaaacacacttgtggtaggggttagacgtgaactagattttcaaacctgtaagccatctgcaaattatcaattacccatcgtaagtgggtgtgctgcaatgtgtgaatattgttacttaaatactcatggaggcaagaagccttatgttaaaatcaatgttaatttagatgatattttaagtaaagcaggtgagtatatagaaaaaagaaagcctgatattacagtctttgaaggggctgcaatctctgatccggttcctgtagaaagatacagtggggcacttaaaaaggctattgagtactttggcaaaaatgaatattctaggtttaggtttgttacaaagtatgcggatataagtgaattgctggcggtacagcataataatcatacaaccataagatttagcataaatactccaagagttataaagaattatgagcataggacatcaagtcttgaagatagaatagagtcagcctataatattttaaatagtggatataaaactgggtttatagtaggccctgtatttttatatgaaaattggaagaaggaatatgaagaactcttaaagaaagctagtgataaattaggagataaagaattagaatttgaaataatatcccatagatttactacgagcgctaaaaataaaatactaaaggtttttccgaatactaaacttcctatggatgatgaagctagaaagtttaaattcggtcaatttggatatggaaagtatgtatatgataaagatgacatgcaggaaattaaagaattttttattaacaatataaatttatattttaacaaggcaacaattaagtatataatttaagtgatattgttttatttactacatataaaagcgtagtttcaaatagtaaaaggctattaagtttttactgttttaaaagctgcgcactagaataagttatttaagtaatatataattattacttgtagggggtacttctatgattttaggacaagaaaatttaaacatagtattatttcagccagaaattcctcagaacacagggaatatagctaggacgtgtgtgttaaccaattctaaattacaccttattaaaccacttgggtttagtttagacgagaagcatcttagaagagcgggacttgattattggaaagacctagatttaagtctgtatgactcttacgatgagttaagagagaagtacaaggattctactttttatttttctacaactcatggtaatggtttttacgatgacgttaaatttaatcaaggtgattttataatttttggaagagaatcttgtggtcttcctgatgagataagggaaagtgatcctgataggtgtataagagttccaatggtaaaaacatctactagatcgcttaatttatcaaatactgttgcaatagttgcttatgaggctataagacagtttggttttcccaatatgaaataagatagggggaaagtgagtggaaaaaataaaaatagtaacagatagtacatgtgatttgccagagtatataataagtaagtttgatattgaggtattgccacttatggtcaatgtaaagggaaaatcatattttgatattgtcgacataaatttcaagcagctttcgaaaattatggatgaagaaaatatatttcctactacgtctcaggtaacaccaaaaagatttaatgattgctttgcaaagtatcttaaggaaggttacaaaattatatgcataaatatgtcttcaaagatgagtggcacttaccaatctgcctgtatagctaaggatatgcttgagtcagaggatgttgtcgttattgacagtcttaacgtgacttcaggacttggagtgttggttttaaaggcatgtagattgagagaagagggaaaatcctttgaagagataaaaaatgaaattatagaaacaattcctcatgttaaaagtgcacttgcttttgaaaggctagataatttaattaaaggtggaaggttatcaaagacagcaggaactataggaaacttacttggaataaagcttatactagaagttaaagatggagaaatggcaataaaagataaggtacgtggaaataaaaaagcagcaagagttgttttggattgtataaaagatgaaagtatgaataaggaagaaaccacattgcttttaaatgctgaaaatgatgatattttaccaatattaaggcaaaagcttattgaacaagaaaataaatttatagaatgtgaagttggttgtgttgtaggagctcattcaggaactaaagcctgtggagtattttttatagagaaatattaatagattattataaaagcacttatttttttattaaatattgattttttttcaaaaataacgtatattagttaaggagttaaaattgtatatatttgtattaaattataataatagtttatacaaggttatttatggtttgtgattttaaggacttaactagattttaattaaacttatccatataacgtttgtacaaaacttatgtgggtaagtttttttatatataagttttaagggggagaatcaatgataaaaaagaaaacaatagcaatattaacaacagttatgatagtagcaggattgtttgcaggttgcagtagcacttcatcaggttcaggaaacagtaaagatactaaaaaagttaaagtaggactttcaactgacgagggaggacttaatgacaaatcctttaatcagggagctgatgaaggaataaaaaaagctgcaaaggagtattctgttgactataaggcaatagaatcaaagaaaaaagatgattatcagcctaatttacaatcattaatagataacgattcagatttggtatttggtgttggatatcaaatggcagatgatttagcaacaattgcaaaaaagtatcctgataaaaaatttgcgataatagatgatgcatatgataagcagcctaagaatataatgtcattagtatttaaagaacaagaaggttcatttttaatgggtgttatagcaggaaagatgacaaaaactaataaaattggttttgtaggaggaaaggatcaaccacttataaataaatttttgtctgggtatatagcaggagctaagacggttaatcctaatataacagtcgagaaaaattatactaacgattattctgatacaagcaagggtaaagaggttgcaacttcattgtataatggaggatgcgatattgtttaccatgcagctggtggagcgggaatcggagtatttgatgttgccaaatcgttaagagatcaaggtaaagatgtttgggctataggtgttgataaggatcaagcagctggacttcctaaatatgcagatgtaatacttacaagtatggtaaagagggtcgatatagctacatacaatacagtaaaagaccttgtaaagggcaaaaaatttgaaggcggaaaagttgaaagctttggacttaaggaagatggtgttggtgttgcaccaacttcaaataagcatgtgcctagtgaagtattgtctctagttgacaaatacaaaaaagcaataattgatggaaaaatagttgttccagatactgttgataaggcgcaaacatttaagacggatcaaataaaataaatttagaaaagctgggttagttgctcagctttttatagaaatataaagatttttactgtaaaaaagtagttgaggaggatttgaatggataaagtaatcgagatgaaggggattactaaggtctttccgggaaccatagcaaatgacaatgtgaattttgaattaacaaggggagaaactcatgttttactaggtgaaaatggagctggaaaaactacgttaatgaatatattatatggtttgtatcatccagaaaaaggccagattattgttaatggtaaaagtgttcagttcagtggcccaaatgatgcaattaaaagcggtataggaatggtgcatcaacattttatgttggttaataactttactgttgctgaaaacatagttctaggtatggaacctaaaaatggcataagggttgatatgggtaaggctattaataatgtaaaagaactatcagacaaatatggttttgctattgaacctaaggctattatagaggatatatcagtaggccagcaacaaaaggttgaaattttaaaggcgctttacagaggagcagatgttttaattctggacgagcctacagctgttttaacgcctcaagaaatagatgaacttggagatataattgaaaaccttaagaaggaaggaaaatcagttatacttattacccataaattaaaagaagtaatgaagatgagcgatagagttacaataataagaagaggtaaggtcacagggactgttaatacaaaggatacaagtattgatgaactagcagagcttatggtaggaagaaaggttaatcttactattgctaaaaaagaaagcaaagctggaaaagaagttctaagagttgaagaacttaaagttaaggatcatagggatgttttagttgtaaaaggtattaatttagttgttaattcgggagaaatactaggaattgcaggtgttgacggaaatggacaatcagagtttatagaagcgttaactggacttaaaaaagtagaatcaggtaatgtaatacttaatggaaagaatatttcaggaaaatccgcaaaatacataaccaatagtggtgtaggacatattcctgaagataggcataagaggggcttagtacttaagtattcactttatgaaaattctatacttggtatgcatcatagaaagccattttcgagaatgtttaatataaattataaggctgttagaaaacactgtaaaaaacttatagaggaatttgatattagaacgcctaatgatgaggttaatgcggcagctctttcgggcggaaatcaacaaaagctagtagtagcaagagaaatatctagaaatccagatttacttatagcatctcagccgactaggggacttgatgtaggggctatagaatatatacataaaagaattgttgaagagagggataaaggaaaagctgtccttttagtttctcttgagcttgatgaaatattagccttatcagatagaatagcagttatgtatgatggcaaaatagtggatgttttagagagaaaagatgcggatgaaaagaagttaggcatacttatggcgggaggaaacttagataagaaagagagtgtgaatactgttgaagaaagataataaaattgtatctggtatagtcaatgcattaaaaagcctagcatttcctatggcctcagtgcttgtttctttgtttgtagcggtcttttttgtaatgtggtctaaaggctatgcaataacacaatattttcaggcacttactgatcttattacaataatagttaaaggaagctttggagataaaacaaaaattcttgatactatggtgtttgtaactcctcttttgtttactggagtagctaatgcaatagcctttaaaacaggattgtttaatatagggactgaaggacaatttactcttgggcttttgtctgcggctgtaataggtcttataccaggattgagtccttggatacatgtccctcttattattcttggaggaatacttgcagggggactttgggcagctgttccaggtttccttaaagctaagttcggtacaaatgaggttataaacagcataatgatgaactacatagctttatattttgttaatcttatagtgctaagaacacctataggaatacctaataaggcaacaacacctataattaagaagagtgcgcagttaattcagtttagtcctagaagtaatgctaatattggacttattattggaatactgtgtgcagttattgtttattggattttatcaaaaacagtttgggggtatgagcttagagctgtaggtactagtccactagctgcagaatatggaggcattagtaaagcaaaaaatatagtattagctatggtgatatctggagctattgcaggacttggaggagctgttcatcttgctggatttatgcatagtacaacagatatgatgggaaccctagggtacggttttgatggtatatcggtggcacttcttgctaaaaataaccctataggatgtattcctgctgcagtcctttttggagtgcttgacagcagttctagattacttcaattaaatagtatacctaaagagatagtttatttgatacaagcagtagtaattatatttgtttctacagattatatagttaagtatttcaaaaacaaaaaaagaaagaaggaggttgctataaatggataagatattattaataattgctatagctgcagcaacatttagaatggcaactccactcatatttactgcaatcgggggagttttttcagagaaatctggtgttgttaacatagggcttgatggtatgatgacaattggtgccttctttgctgtacttggttcttatttaactggaagtgctattctgggacttatatttgcagctgttgcaggaggaattatagcattacttcatgcatttttaagtataaacctgaaagcagatcaagtaatttcaggtactgctataaatttgttttctacggcttttgctagctttctaatatttagaatttttcataagggcggtcaaacagatatagtcaaaggatttacatttaatgttcctaagataattaagagtatacctattttaggacaatttatatcaggattaaactggtttgttattggagctataatattagttatagtggctgattttgtactatttaaaactcctattggacttaggataagagctgttggagaacatcctaaagcggctgatactatgggaataggggtatataagattaggtatttttgtgtaattctttcaggtatgcttgcaggcattggaggcgcctcgttatcaataggtatgactcctatatatagagacggaatggtttcaggaagaggatttatagcaattgccgcaatgatatttggtaactggaaacctaagggtacgctttgggcatgtttactctttgcttttggaaatgctcttgaaattaacgctagaaatttaggcttttcaataccagatgaaatatactctatgataccatatatattgactatgcttgctttagcgggatttgttggtaagaccatagcaccagcagctgatggaataccatacgaaaaaggcgagagatgatataaaaatatataacttgattaaataatagataagaggctttttataaggtctcttatttcttattgaggttatagttgtttagatttgtatttacaatacaaaatataccataaatatcaaaaaatatttacttttcggacataaacaagaaagtttaataaaaattaaaattaaattaatttttttagtaaattctatggaattatattgtaaaataagaaattatgttttataattgaattagggatcccggaattatataattaatcagataacgtttacaaaatattgaaggcgaggtgtaactgattttataaattgatttttatagaacaggacgaaagatgaaaagaaatagaatgaaaattttaaatttaccaatattttttgtagtactaatgtttttactatcaaatgttggtattattagggtcaaagcaaacaatttaacaccagttgaaataaatggtcaacttaaggtttcaggaagtaaattactaaattcaaacaatcaacctattcaactcaaaggtatgagtagttttggtatacaatactcgccacagtttgtaaattataatactatgaaatatttaagagacaactggggaatgaatgtatttagagttgctatgtatactgacggagatggaggatatatatttaataaggcagcttgtaaagcaaaggttgaagaggctgtaaatgctgctcaaaagttaggtatatatgtaattgttgattggcatatgtttaataatcctcaaactgataaaagtcagtcaaaggacttctttaatcaaatttcaagcgaatataaaaattcacctaatgtaatctatgaaatagcaaatgaaccatgtggcgatgtaacttggggaagagatataaaaccatatgcaaatgaggttataccagttattagagccaattcgcctaatgcaatagttatagttggtagtcctacatggagtcaatctgttctagatcctgccaatgatcctttaagcttcagtaatgtaatgtatgcgtgccatttttatgctggaacacatggtcaatggcttagagatagaataacacaagctcttaacaaaaacatagctttatttgctacagaatggggaactagtgattgcaatggtagtggaggaacttacatagaagaatctcaaagatgggtagattttatgacccaaaataaaataagttggactaattgggttttagatgatgcaaatgcaacagcatcaatattaaagcctggaagtaatcctaatggaggatggactgacaatgatttgacagagtcaggaaagtttgtaaaggcggctatgcttcaaaataatacaccaactacaggtggaaacacaacaccaactacaggcggaaacacaacaccaactacaggtggaaacacaacaccaactacaggtggaaacacaacaccaactacaggtggaaacacaacgccaactacaggtggaaatacaacgccaactacaggtggaaatacaacaccaactacaggtggaaatacaacgccaactacaggtggaaatacaacgccaactacaggagctgtaatagatactagtaaaacatataaaataatatcttcaagtacaggtaaggttttaaatgtaagaaactatagttctcaaagcggagcacaaatagaagaattagttgatgttggtgcgttatcagaacagtggaaaatagcggattcaggcaatggaagctataaaattacttctgcattgagtaatttaagcttagatggtggtgtaagtactgaaggaactgatgttaaacaatatcaatatgcaggtgcagaaaatcagcagtggaatattgaaaaaataaatgccaatacttataaaatcacaaataagaaaagtaatttagcattagaaactactggagtttatgatagtgcagatattcaactttggaattacacaggaaaaggaactcaacagtggataatttcagatgtgaatgcaggaacaaatacaacaccaactacaggcggaaatacaacaccaactacgggtggaaatacaacaccgactacaggaagtgctatagataatagtaaaacatataaaataatatctcaaaatacaggtaaagttttaaatgtaagaaattatagttctgaaagtggagcacaaatagaagagttagttgatgttggcgcactatccgaagaatggaaaataacaaattcaggtaatggaagctataaaattacgtctgctttaagtaattttagtttggatgcaggtacaagtactgagggttctgatgttaaacagtatcagtatactggcgcagaaagtcaacagtggaatattgaaaaaattgctgctaatacttataaaataacaaataagaaaagcggtttagctttaaatggaactggagcttgggatggttctaaccttcaattagctaaatatagcagtacagcagatcagcagtggatacttaaggctgttaactaagagtaatatttaaagacagtataaagaaatgaagtgagattaatataaaatgaaacctatatgaacaagcattatattgtataggtttcgttttaaatatcttgcttatttttgtattcgtttttaggttagtattaaatagaattatatataattttaataaattaacttattatacaattatagtacaagatgaaataattaatgtataattgataattaaatatgatataattaaattattaagttatataattaaaatttaggtgaaaaaaatgaatttggattttgaattgaatttaactcagcagcaaaaattagtaatgactcagcaaatgcagatgtcaataaaacttcttcaaatgtctaatatggaattaaatgagtatatcaggagtgaaatagaagaaaacccacttcttgacggaaaagaagtaataaaaaatgatgagtatcagtcagaaatgagtaaagtggactacaaagaatttataaaatatctggatttcgataattatactcatgaaaattattcatacagaagtgaagaagaagaggtatcaccttttaattttataggtagtaaaaagtcctttacggagtatttattagaccaacttagagagataagtatagatagtgaaactaggcatatatgtgaatatataatagaaaacttagatagggacggatatttacgggatagtttagaagatatagggatggctgtgcacaaagagttaaaaagtgtacaaaatgcacttaatgtagtacaatccttagaacctattggagtaggtgcgagaaatcttgcagaatgtttgaaacttcagatttatgtgaggaatgtaaacgatactaaactaatagaaataattgataagcatttaggcaatatagctgaaaataaatatggcgtaatagcaaaggaacttaatataactccaaaggaagctcaagaatatggagattatataaaaaaactagagcctaagccttcgagaggattttttacaggtgacgaagtaaaatatgtagttccagatgcgtttatacgaaaaatagatgatgatttttatgtaataatgaatgatagttcaattcctaaattatctataaataatacctataagaatatattaaatactgaaaacgataaaaaagatgtggactatgtaaaagaaaaacttaatagtgctatgtttcttcttaaaagtatagagcagagaaaaactactctttatgaagttctaaacgaaattttaagataccaaaaagcatattttgttggaaaaactaattatttgaggccaatgacactcaaagatatttcagagaaattaggtatgcatgaatcaactataagtagggcgataagagaaaagtacgtatatatcgatacaaagggtttggtaaaaataagagatatgttcactacgggaatagcaagtgcttattctgtgtctgaagataaaaaggatatgtcaacccaaaaaataaaaaatgagattagagatttgattgagaaggagaataaaaaaagtccattgtctgatcagaagctttcagaaattttgaaagaaaaaggtatgaatatttctagaagaactgtagcaaaatatagagaagaaattggtataaaatcatcagctaaaaggaaacgttattaaaaagtgctaaagaaatagtatttatgaaaaaattatatttttttcataaatactatttaaaaattattttttttatcttataatattagtgggacatgatttatgatgctgggactatatatgtccagcgaggtgatttaatgcacgagattctaaaattgcagcaaaaaatcgttcctgagcttatggatttgcttgaaaagagatatgacattttaagaacaattaaatataaccagcctataggaagaagaatacttgcaaataaaataggtataggtgaaagagttgttaggacagaaataaactttttgaaaaagcaaaatctcataaatataagcaatccaggaatgtcagttacaaaagacggagaagaaataattgataaacttaaaaatttcataagggaatttaaaggattaacagatattgaggaattcataagaataaacctcaatataaagaaagttataatagtgccaggagatatcgatgaagatagtacagttatgaatgaaattggaagaacagctgctaaatttatacaaagcataattctagacggagatattgtagctattactggtggtactaccatgaaaactgttgttgataattatagttattcacctagatatcagaacaccgttgttgttccagcaaggggtggtatggagagaaatcttcaaactgaagctaatactttagctgccaattttgccgataaattgggtgctagctataaattgatacatgttccagataatttaagtaatgaggctttaagtacaataatcaatgaaaaaagcattaagaacgcaattgatactatacgtaaagctgatataattatttatggagttggaagagctgatgaaatgagcaagaggcgtgggcttagcgaagatgaaatatcccacatactcggaagtggttctgttgctgaagcttttggatatttttttgataaagaaggaaatgttgtatatcacactccatcactgggacttaaaacagaagatattaaaaaagccaaaaatattatagctgttgcaggtagcaagcttaaagcggaagctattgtggcaacgcaaataaatggcagaggaaatatccttataacagatgagggaaccgctaaggaaatagtgaaaatattaaaaggcactaaataaaatcaatttatctatttgttgtagatatataatcttttcacgcattaaagtatattgtgtgtctatagcagctgatattattttagctaataattatattttaaatataattttagatattaaaaaatttttggaggtagttagaatggcaaagatagctattaatggttttggaagaataggaagattagctttaagaagaattcttgaagtacctggattggaagttgttgcaataaacgacttaactgatgcaaaaatgttagcacacttatttaaatatgattcatcacaaggaagattcaatggagaaattgaagttaaagaaggagctttcgtagtaaacggaaaagaagttaaagttttcgctgaagcagatcctgaaaaattaccttggggagatcttggaatagacgttgttcttgagtgcacaggtttcttcacaaagaaagaaaaagcagaagctcacgtaagagcaggcgctaaaaaagttgttatatcagctccagctggaaacgacttaaagacaatagttttcaacgttaataatgaagatcttgatggaacagaaacagttatatcaggtgcatcatgcacaactaactgcttagctccaatggctaaagtattaaatgataaatttggaatagaaaaaggattcatgactacaattcatgcgttcactaatgaccaaaacacattagatggtccacacagaaaaggagatttaagaagagctagagctgctgctgtaagtatcatccctaactcaactggtgctgctaaagctataagccaagttattcctgacttagctggaaaattagacggaaacgctcaaagagttccagttccaactggttcaataactgaattagtttcagttcttaagaaaaaagttacagttgaagaaatcaacgctgctatgaaagaagctgctgatgaatcatttggatacactgaagatccaatcgtttcagctgacgtagtaggaatcaactacggatcattatttgatgcaactttaactaaaattgttgatgttaacggatcacaattagttaaaacagctgcttggtatgataatgaaatgtcatacacttcacaattagttagaactttagcttactttgcaaaaatagcaaaatagtttaaagcgctcattaattaatttgaatagattaaagtagaacatagtaaaaaggtctggttttatagttaaacggctatgaggctggaccttttataaaatataaataaggtagtatgaggtgaatattatgaaattcaataaaaagactattgaagatgtagatgttaaaggtaaaagagtattagttagatgcgattttaatgtacctttaaaggacggagtaataactgacgaaaacagacttaatggagcacttccaactataaaatacctttcagagcacggtggaaaagttattctttgttcacatcttggaaaagcaaagggaccagatccttcaaaaactttagctccagttgctaaaagattaagtgaattacttggacgcgaagttaaatttgctgctgatgatacagttgttggcgagaatgctaagaaggctgtagctgaacttaaagaaggagaaatagttcttcttgagaacacaagattcagaccagaagaaggaaaaaatgatgatgcattctcaaaagatttagcttcacttgcagatgtatatgtaaatgatgcatttggaactgctcacagagcacactgctcaacagttggagtaactaaattcgtagatactgctgtatgtggatatttaattcaaaaagaattaaaattcttaggatcagctgttgaaaatccagttagaccttttgttgcaattcttggaggagcaaaagtttctgataaaatcaatgttataaacaatttacttgaaaaagttgatacattaatcatcggaggcggaatggcatacacattcttaaaagctcaaggatatacaataggaacttcacttcttgaagcagacaaagttgattatgcaaaagaaatgatagaaaaagcagaagctaaaggagtaaaattacttcttcctatagataatatagttggagcagaatttaaagcagatacaaaagcagttacaactgaagatgcaaatataccagaaggatacatgggattagatattggaccaaagactcaaaagctttatgctgatgctgttaaagaagctaaaacagttgtttggaatggacctatgggagtatttgaatttgaaaacttcgctaaaggaacaaaagatgttgcaaaagctatggctgaatcagatgcaacaacagttataggtggaggagacagtgctgctgctgttaatcagttaggatttggagacaaaatgactcatatctcaactggaggcggagcttcacttgaattcttagaaggaaaagaacttccaggaatagtagctcttaatgataaataataataattattagtaaataatatttacaaataatagaatagtgctataatgaaattaaagatagatatatgaagctattccaatctaaaactacatatgataaataatccattgaaaattattattgtgcaatatataatggttttgattaagagtagcctcatataaatactatctataaaataaggagtgtatttaatgagaacaccaataatcgccggtaattggaaaatgaataacacaattagtgaatctttaaaattaattgaagaattaaagccacttgtaaaagatgcaaaggctgaagttgtagtagcacctacagctgtttctttagaaactgttgttaatgctacaaaaggaagtaacattaaggttgctgcacaaaatgcacactttgaagaaagtggagctttcactggagaaatatcactaaaagcacttgaagaattaggtgtaagttatgtaatattaggtcatagtgaaagaagacagtattttaatgaaacagattgtgctttgaataaaaaagtaaaagcagcatttgctcataatataactccaatattatgctgcggagaaactcttgaagaaagagaagcaaatgtaacaaatgaagttacaggaaagcaaataaagttagatttagcaggattaagtgctgaacaggcagctaaggttgttatagcttatgaaccaatttgggcaataggaacaggtaaaactgctacagatgaacaggcaaatgaaacaattggagcaatcagaaaaacagtagaagtaatgttcggaaaagaagttgcagaaaaagtaagaatacaatatggtggttctgtcaaaccaaatacaattaaagctcaaatggctaagccagaaatagatggagcattagttggaggagcaagccttaaagcagctgattttgcagcaatagttaatttctaaaggcaaagagaaaagctcataatgtatgtattatggagttttctccataatacatattacatatacaaactaaatataagttaattacttataattggtaattgagaattgataatagaaatgagtgtctactgtcaattgctaattaacaaaagcatagcaatataaagaatgggggaaataatactatggcaaagaaacctgtaatgttaatgatattagatggatttggaatttcagacaaggttgatggaaatgcagtaaaggctgctagtaaacctaattttgataaatactttaataactacccacatacacatcttggggcaagcggactaagcgtaggacttccagatggacaaatgggaaactcagaagttggacacttaaatataggagcaggaagaatagtttatcaatcgcttacaaagataacaaaggcaattgaagatggagatttctttaaaaatgcagctcttaataaagctgttaataatgtcttagaaaatgattctactcttcacttaatgggacttttatctccaggaggagttcactcacacactaatcatttaaagggtcttttacagcttgcaaagaagaagaacgtaaaaaaagtatttgtacatgcttttcttgatggaagagacgtaccgccttcttctgcaaaagaatttataaaagatatagaggactacatgaatgaaataggtcttggtgaaattgctactgtatctggaagatattatgcaatggatagagataacagatgggaaagagaagaacttgcctacaatgcaatggttcttggaaaaggtgaagaggcagaaagtgctattaaagctgtagatgcttcatatcatgacaacaaaacagatgaatttgtactaccaacagttatagttaaagaaggaaaaccagttgcgactataaaggacaaggattctgttatattcttcaatttcagacctgacagagctagacagataactagagctatagcagaagaagcttttgacggatttaagagagacagacttaatattgagtttgtaactatgacagaatatgatgcaagctttaagggagttgatgttgcatttggacctgaaaacatcacaaatactcttggagaatatgtaagcaacaaaggtttaaatcaacttagaattgcagaaactgaaaaatatgctcatgtaactttcttctttaatggaggagttgaagagccaaataaaaatgaagatagagctttaatatcatcaccaaaggttgcaacttatgatcttaaaccagaaatgagtgcatatgaagttactgatgagcttctgaagaggttagatgaagataagtatgatatggttatattaaactttgctaaccctgatatggttggacatactggaattcttgaagcagctaaaaaggctgttgaaacagttgatgaatgtcttggaaaaatagttgacaaggttcttaaattagatggaagtgtatttataacagcagatcacggaaattcagagcaaatgatcgattactctaatggaaaacctatgacagcacacactgttaatccagtaccttttgtttatgtaagtaatcatacagaggctaaaaaacttaatgaaggagttttagcagatatagctcctacaatgcttcaagaaatgggacttgaaaaacctgaagaaatgacaggaaaaagtttatttgaatagtataatttaatattttattgtaaaaaataaagtgtagtatatgaataaaattgaatattggttttattacatgtagtacacttttatttatatataacaaagaaagataggggtgttttatatgaaatcatatgttgaaattgttgacgtaatggcaagacaaatcttggattcaagggctaatcctactgtcgaagtagaggttgttcttgaagacggaacagtaggaagagcgtcagtaccttcaggagcatccacaggacagtttgaagctgtcgaacttagagacaacgataaagctcagtacttaggaaaaagtgttctcaatgctgttgacaatgtaaatgagacaatagcaacagagcttataggaatgaatgtatttgaccagacattaattgatcagacaatgcttgaaattgatggaacggaaaataagtcaaagcttggtgcaaatgcaatgcttggagtatcacttgcagtagctagagcagcagctgaatacctaggaattagtctttatcaatatcttggaggagttaatgctaaagttcttccagttccaatgatgaatattgtaaatggaggaaagcatgcagataacaatgttgatttccaagaatttatgataatgccagcaggagctccaagctttagcgaagcccttagatcatgcgcagaggtttatcacactttaaaatctttactacaatcaaaaggacttgaaacagctgttggagatgaaggcggatttgcaccaaatcttaatagtaatgaagaagcaatacaaattattttggaagctgtaactaaggcgggatatgagccaggaaaagatatgtttatagcaatggaccctgcttcaacagaattttatgagaacggaaaatacaatcttaagggcgaaggtaaggtttatacttcagaagaaatggttgaagtttacgcaaatttagtggaaaaatatcctataatatcacttgaagatggtatggctgaagaagattgggatggatggaagctgttaactgacagaatcggagataaagttcaattagtaggagacgatttatttgttacaaatactaagagactttcaaagggaatacagcttggagtagctaattcaatactcataaagttaaaccaaataggaactcttacagaaactttaaatgcaatagaaatggcacaaagagctggatatacagcagtagtttctcatagatcaggagaaacagaagatactacaatttcagatcttgttgtagctgtaaacgcaggacagataaaaacaggagcaccagcaagaacagaaagagttgcaaaatataaccaacttcttagaatagaagaggaacttggcgaagttgctgaatttagaggtttaaatgccttctacaatataaaaaaataattataaaataagggggatttaatttgataaatttcccttattttctattgtaatataatagtatttatgatagtattaaagatataatattatatttatacaggagatttataggaggtttaagatgcgtacttttttgatagttgcacaaatagttttggcttttgctataataattactgttcttgtgcagccaggtaaaatggatggctttatgaattcaatatctggtacaaatgaaacgttttttgctaaaaacaagtcaaaaacgaaagaggcatttctggttaaattaacagtcttattttcagtattatttgcaataactcttattatatttaatttgaaaatatttaaataggataatgtcataaagatatgattcattttactttttgaattgtatcttttttattttatgaatttatattgaataatatttgaaataaaagataagaattataatgaggtgattatacatgaatataagggataatatacttgaatttatgagagaacaagcatataagcctatgaacataaaggaattatcagaagtttttgatataggtaaagctgattataaaatatttaaaaaattacttaaggatatggaaaaagaaggacttataattaaaaatagaacggaccactttggagtaccagaaaaaatgggacttgtgaagggatctcttcaaggaaacgctaaaggttttggttttgttataccagaagaggatagaccagatgtatatattccatctatcaatatgaatggtgcactaaatggagataaggtagttgctaaaattcttaaagaaagtgatagtggtaaaaaatgcgaaggtgaaataataaggattcttgaaagagcaaataaaactgtagttggagtatacgaggatagtagaaactttggttttgtagttgctgatgatgctaggataccacaagatgtatttattcctaaaggagaaaagaatggtgctaaaagtggagatgtagtagttgctgaaataacagtatggcctaagaaaagaagaaatcctgagggtaaaatagtagagataattggaagtaagggagaaaaaggtgtagatatacttacaataataaagaagcataagctcccagaaaaattcccagaaaaagttgaaaggtttgcagaaggtataccaaatgaaataccagaaagtgaatacaagagaagaagagacattagagatgtaaagatggtcacaatagatggcgaggatgcaaaggatcttgacgatgctgtatctatagagaagctttcaaatggtaactttaaattaggagttcacatagctgacgtttcaaattatgtaagagaggataatccgcttgataaggaagctcttaaaagggcaacttctgtttatcttattgatagagttattccaatgcttcctaaaaagctttcaaatggaatttgtagtcttaatccaagacaggatagactagcaatgagttgttttatggaaattgatcctacaggaaaggttattcaacatgaaatatttgaaagtataataaaaacaaacgaaagaatgacgtatacagatgtaaccaaaatacttagagatcacgatgaagaaactattaaggcttttgaatacctttatgatgattttaagaatatggaagaattagcttctatacttaacaagaagagattattaagaggagcaatagattttgattttgaggaaagtaaaataactcttaatgagcttggaaaaccagtagaagtaaagccatatgagagagcagttgcaaatagaataatagaggaatttatgcttgtttgtaatgaaactatagctgagcacttttactgggctaatattccttttgtgtacagagttcatgaagaaccagatagtgaaaaattagaaagattcaatgaatttattcataacctaggttatgcagtaagatggggatcagaggttcatccaaagcagcttcaagatgtaatagaaaagataaaaggaaagaaagaagagacagttgtaagtacgcttcttttaaggtctttgaagcaagctagatattcgccagaatgttcaggtcactttggtttggcagcaaggtactattgtcattttacttctccaataagaaggtatccagatcttataatacacagaataatgaaggaatatataaatggaagaatggatgaaaagagatctaaaaagctcataggagaggttgattatgcttcaatgcagtcttctgaaatggaaagagttgctcaagaagctgaaagagaagtagattccttgaaaaaggcagaatacatggctgatagagtaggtgaggaatttgatggtataatatcttctgtaacaaactttggtatatttgttcagcttgctaataccatagaaggtcttgtacacattagtgaacttacagacgattattatgtatatgatgaaaaatatttaagcctcgtaggagaaagaactaaaaagatatacaaattaggtgatgaggcgagaataaaagtagataaagtaagtgttgattctcacgaaatatattttaagttggttgagaataaaggagaagcggcgcaaggagaaataaaagtagaggcagagactgaagtagaagcagaagaagaggaagaagaattctagatgcataaacttatatcctttcataaaaatattttgtaaggatataagttttaattttgctacggtgagattatatgtgatataattttaagaaaagtatagaatgaaaaattatataagtaggtgacattatggctaaaaagaatacagaaaataataccttagctgataatagaaaagcatggcatgactattttattgaagaaacatatgaatgtggagtagaactcgttggcacagaagtaaaatcaataaaaaatggaaaagctaatcttaaggatagttatgcagaaataagaaatggagaggtttttgcttgtaatatgcacgtaagcccatataaagaaggaaatatttttaacgtagatcctttgagaaagagaaggctgcttcttcataaaagtgaaatagataagcttttaggatttacaagtcaaaaggggtatactttagttcctatagcattatatttaaagaatagaagagtcaaggtaaagttggcggttgctgtaggtaagaagaattacgataagagggacgctttaaaggaaaaagatgctagacgtgaaatagatagagctatgaaaaataataggtagagtggtgtaagtttattaatttacaccactcttttatttctgttcttaatatattattatggtgtataatatatattaaggtaaacatgatggtttactctaatatatattttggagggattgaattgaaaaaagttagaactaagttgagcttaatagtaagtgctgcttttactttaagtttcataggtatcttgccaccacagttaatggctaaaacttctgacatcccagtagtagagacaaaatataaaacagcttcagataatgcatacacttggttaaaaactcagcaggattctgcaaaattagatggtacaggtcttccgagtggtatggttgacagttttgaagattattggggacctaatttacctaaacagataagttatacttatgatcaaggggttgctgctattgcattcttattaaagggtgatacaaatagaactaaaaatgttcttacgcttatgagtaaaatacagggcagtgatgggtcatggtgtaactcatattggaataataacctatcgggtcaagaacttataaaaaatgttggacctggaatgtggatatgcttagcagtaatgaactatgaaaaaataacaggagacacttcctttcactcaatggctactaaatatattgattgggcacttcaatttcaaaaacctaatggaggtatttcgggtgggcaaacatatgcatcaggagtttggcagccagttacttggtcaggtacagaggaaaatatagatgcgtatgcagctcttaaatatttttcaagtacaactccagataaaagttcagtatatgaatcagcgcagaatagagttaagagttttttagataatatagaatgggataatacaaacaataggtttcacggaggtttcaaaaatgatactcaaacagtagatccgtatgttcctcttgatgttaatccgtggggagttatggccttaagtggtgccagtaatcctcataattatgcttcaagtttagcttatatagaaaatgcaaaaggtaacgcgtctggagtaggtacacttagtaatcctaaatatgttgagactttaactgctgctgataacggaaaaactatgactttatatgattttgattgggaaagcgacaatgtgccttatagctcagatgcatccatgggattaaaaggtcctgatatatggttcgaaggctcagcattcatgtcatgtgcttattatatgcagggaaatacaagtaaggcagacagtataatagatgacataatgaagaagcaaagtacgtcaagtggagaatctcttggaggaattccatattcacttatgggaacaaataataattattggcatatggctcaagaaaattgtgtatctagtacaggatggtttataattgcttcaagtaggtggaatccattcactggggaatatttgaattccgcaataccaactcctacaccaacaccagtagatacctcttatggagtaacaaaaactggtgataatagtgctgtaatatggttttctccatcacccagtgcagcgtgggcagatgtacattatgtagttaattcacaaaatcagcttaattatagacatgacgtataatagcatccaaaatagatgggagcaaaatgttacaggacttaaagcaggagacacaataaagtattcatttacctattggcaaacagcagctacggattcaccttcatataactatacattttaatagtacacaagttttgaatgtacatagttatttagcaaaatactgtgtacattctctacattttgttattatatgaagataaattatacttgaaattattaaagtattggagtatcataataatcgtcgcaagtgcatatgacatcttaaataatttatttatctaaattaaagtacttgcaaataaaattaaatgtgatataatcattattacgatttaaaacaagtaaaaagcttaacgttatccacatgaaactttgtgtttattcacagttttgtgccttttaattttaaacttgtgtataactttcgagtttaaggttaaatactataatatgggggcgcttttggtttcgacggggatgatgttacgtttgagaagcgagtcgagggaacctgtggacccgcgttaaaaaactataggccttaaaaataaaggataacgaaaataatttagctttagctgcgtagtcagctaacgtcagcctgagagtcccgcgactcagagtctggcgtcgacagcggggaaccgagccttacaaagctttgagtaaggaacggaatttatgaagctactgaagtgaaaagcttgtttgtaggcgtttcatggagggaatgttaaaatacaaactgcactcggagatgcttaaatgaaaccattttcggacaggggttcgattcccctcgcctccactatgaaaaccctcgacggatgtcgagggttttttccctatttaaagcgaaaatatatggatgaattttaatttatcatttgcaagaaaataatatattgacaattgaaatttagttgtgtacaattaaattgcaacaaataaagtttgacacagatgtttacgtaaagatggagaattacgaggaaataagattatgaatgtgcaaaggatgtgtaattattgctgctatgtatggagcgattacatctaataaaaatattttgataaagcaaggtggtttagccgtattagcaataactcttttaattttagctacatcataattatttatagatatattatgataatataacagataaatttaactaaatgggcggaattaaatgcgtataaaagtgccagtagtagactaaaaaaagaattccagattataaaaaaacaattatgggaagaacatttttggagcataagttattggcttataacaactaggagtgaacaaatagatatagttaaaaagtaaattgagctatataaaataatttaaaataggaggaaatttattatgaataatacaatagatacaatgaaaaatcatagatcaataagacaatatctagataaagaggtgccaaatgatttaatcgatgaaattgttaaaagtgctcaggctatgcctaactcaatcaatggacaacaaacatctgttatagttgtaagagataaaaagaagagagaaaaattagcagaacttgttggtaatcaagaatatgttgcaaaagctccagtattcttagtatttgtgatggatttttatagaacttatcttgcaggtgaaaaaactggtcttaagcaggtaattcatgaagatatagaaggtattcttgcagggtctgtagatgttggaatagctttaggagcttctgttgttgctgccgaatcccttggacttggcacagtgcctattggtggtatcagaaaaaatccagaagaagttatagaaatattaggattacctaaatatacttttccaatggtaggtttagtagttggatatccggctgatgaatcacataaaaaacctagggttccttttgaaagttttaggcataatgagagttatgatataaaagctgttgaagattcaattaatgtttatgacgaacagatgaataaatatctaaaggaaattggaagagctgagaaagaaataaattggagtacttttacttcaacaatttatcaatctgtttattatcctaaagttaaaggcgctattaataaacaaggactaaaaactaaataatcaatatggaaattattgttaataaatataatgctgtaatactaaaaatgattatatagttgttgtggatttcaaaggtcacgattcgcctccactaaaaaacaacccacacaaattgttgtgggttgttttttagtgtttagatatttagaaaagggttttatatttttgtatatagcaattttcatattgtaaatgcaggttttaaaacatatgactttggacaatagtacataggtacatattgcgttaaacattattcttaccatggaacagttctagttttatcgaaaaatcctcctgtaggtccgttttcatctagagtggcaagttttactataatctctgcagcttgctgaattaaatttaatgttagtatctaatagttcctttgaaagagttagagtaagcatattgagaacggctttggaactgttataagctaaagcatatatagctttattggaggaatcaccattagcaggatatgcagtagctgtagctggtatggtatcccttgaaaaagacagccgagcagctggtggttttttcattaaagaagaaaagataatcacctatatggtttaaagaatgctcgaatttcttctgctagaagctcaggttcttccatggcagtaaaatgtccgcctctaggcattgtagtccatcgagttatatttaaattgcgttcgacccattctttaggcggaagcaatatatcagctgggaagatagccatgcctgttggcacatcaatataactcagtgaaggcaaagaatgtgtattttcataatatatatttactgatgagccaatggtatttgtaacccaataaatcattatattagtgagaagttcatccatgttaaagcttctacttaagttgcctttacaatcgctccaggcacgaaatttttcgataatccaagctgctagtcccactggagagtctgaaagtccatatgcaagagtctgaggttttgtggattgaatagacatataagcaccttcttcagaaatccacttagaggcatttttcttatattgtacttcttctccagaaagttttagattaccttgtgaagtcattaaagctttgataataccaacatccgttagatgaattcctattagaagttcaggatggtttaatgcaagatatcttgtaaccccagaaccaacatcacctccggcggcggcgaatttattatatccaagtttttcagtcattagttttgcccaaagttcagaaacatttgaattgttcattccgccatacttaggtttgccggaaaatccaaaaccaggtagagaggggacaatgacatcaaatgaatcttctgggttaccaccatactttgcagggtcagtgagtaatggtataagctttttgtaacgtatgtaactatcgggccatccatgggttaagataattggaatagggttaggtcccttaccgtgctcatgtataaaatgaatatctatcccatctattttacaatgaaactgagaaaaactatttagttcggtttcttgtgcacgccaatcaaagtcctctatccaataggatacaagagattttaaatagtttaagtcagtgcctctttcaaagcctaggtcttctaattgatcaggccatttaacattctttaatctggattttaaattattaagtacttcatcagatactttaatattgaaacgttttatagacataataattctcctttcataacatttaagtattaacaatagtttatcatttataaattatgatacaatgagataaatgaagctttaaactatactatttgttaatggaggaatgtttatgcctcaaatggaccgttacaagaatagatctgtatatattgaatttaatgcagaggaggattttaataaacttccgtataaggcgagatttacgatagtttttgtaacaaatggaagtgtgaatttgaaacttaatgcctatccaataaaagttgtagctccaagtattctttgtttgtcaaaagacgataaaatacaaatttttgaaaagaataatttagcttcacagtcattcagctttcatccagatttctttaatacagcttatttttctgaggaaacaggatatatgtcaaatagcttaaagatagaaacaggactttctctttttaaaaaggataataaaaataatggagtatatactgtaactgagaaggcttatcctaaactatatgaatggttctttattatgggaacagaagtacatgcacagagcgattctctttgggtgtgcagaataaaaaaatatttaatacaaatattaggtttgcttgaggaactgaataaaaacggagagcagtcacctgttgattgagttttagaatatatacatacaaactatagtgatagaataagtttagaggacttaacaagatgtgctcatttaaatagagtgtccctaaataaaatgtttaaggaattaactggatacactgccatgggatacttgttgacatatagattaaagatggcagaaagtcttttaactcatacagatatgagcttaaatgaaattgcacgagctgctggctttgagtatgacacttatttcataagacaatttactgataaaaggggaatgacaccaacggagtttaggaattcttctcgtgagtttgtttattattatcaataaaagagagagttttatatagagttagttttgtacatttttagccaaaggttgaagtgttttactgctttatgtagaacaaatattatactaatcattattaatatactaattagtatggaaaaagataaggttaggacattgtaattaggtagaatattgttagtaactttatgaagcataaaaaaacaaagaggaataaaaattatacttgttgctactccaggaacatattttttaaaatttatagtcataataatgtgaaatattaggtgtaatgtgaaagcagtaaaaaatccaaaccatgcaataaaactgctaagtaagtaacaaattgtagtaagtgctgatatgattacaaattccaaagctactccaaaagctattgaggcagtagaaccattaaaattatacggaatgtatttacccttcctactttgaatatattgtttgtttttttcttgccatacattaatcattaagatttcctcaaagtcatgaatcatgaagattattggaaagagccatataatagtaaataatgttttcataatataaacctcctttaattatcaattaagtgacacatttgtgctgcttgatgctttttagtataatatccatcagaaggaaaatcaatagatttgctttaagtgctacaaatagaaaaaaatgtgtcatcaaaattcaagggagaagcttatgaaagaaaaatctaaaatcaataaaattgcaatgcagtcaagaaaatggataacagaagccatgttaaagctgttggctgaaaaaccatatgaaaaaataacaataacagaaatagcttatacagctcaacttggaagacggacgttctatcgaaattttgcgtctaaggaagatgtattggatatgtatataaaagggctaatagatgaatatattaatctattaaaaaatgagtatttaacaatacataatggtgctaaagtttactttactttttggagtaaacatttagactttctaatattaatggaaaaaaataatcttctgcaccttttattgcaaagatttaatcaatatttacctatgattcataaagaggttaatgaaaataaaatagaaaagtttaatgatagaatgcttgagtatgtattattctttagtgccggaggtttttggaatatacttgttaaatggctgcaagatggtgcaaaggaaacacctgatgatatggcaatgttaatagattcaatattaagtgacaaattaataaagtaaattgtttttacttttcattaattttatatgtgaaaaagcgctaattcttatggaataagcactttttattgtgagctaagataagaaaatattaatggagcttaaaaaggcttacccaaaggtggtttgagagactactgaataaaacaattcttaagctgtaataaattcatctcattactattctttaaagcattaacctaaattgatttagaaaaattacggaatgcttttataattatttgagccatttcttgaggtgattgtctatctgtacgatctatccaattagataagacattccaaagcccacctatactataaagtcctatatattcttcttcagtgtgattatcgtaatcatgccatttaacgttttcaaatttattaatattaggtataaatgagtttgcctgctccataattaaataaaataaatgattttgttttagtagtttcaattcattaatatgtttattccaaaattcaaaataagtaataagaacgtcattaatagagagtactgtaagctcttttaaagattctgtatagtcctcaaataaataattaaaatactcagataataagtcttcttttattttaaaattacgataaaaagttcttcttgacagctgtgctctatctgctatttctttaactgaaatactcgagtatggtttttctctcattaaatctaatagggcttgaaccagccatttcttggattgttctgcaatacgatttgttttctgtttcaaattatccctcctaaagtgtcacagatttctttatatgtagcacttgttcgaatagtattgatattatttatagatattattatactatgtttagaaataaatgtcacatgtgtgactgtgattcacatgtgtgacacgatttgaaacttattaggagatgatttatatgaacaaaatgaatgctattgcctggttacttcctatcctttttatgattcatgattttgaggagattatattcgttaaggtttggagacagaagtatcagtattgtcttgatgcttccgcaatgaaaaagaagccattttcacattttaaaagtacagatgaattttcaataggagtagaaataatatttgtaattctttcgttaataacactaatttctatcatttttaacgattaccatgtttggtatgggttcatatttactataacagctcattttataacagctcattttaagggtgtattagaattcaaacattatgttcctggatttgtaacttcaatcttgtttttgccattaaatgcttatatcatttatattgtaacagcaatgttaaggtttaatgcagttgatatattaatatcatgcgttctaggagcagcagttggttttttcatttatacattccttcacagtatggaaaaaaattttgcaaataaattaattgaatattcaattaacaaaattgaaaaataaagaaagcagttaggaaatgtattacggtgtaacgtggtatgtaaaagtaactttattatttttaatataaacaatacaaaagggctgcaatttaaaaccttgcagccctttataaatttaaatttcagaaagtttctttaaatgcttttcagaaattttagttaccttatctacacgaattttatatttttcaatatcacctaggaaatcagtattcatccacgtatttatggtttcaagggctatggcagaacctattatttttgcgccaatgcaaagagcatttgtattagagtgtgagcgagcgagtttagcacaaaatggatcctggcaaactgctgcatacacgccatatattttatttgcaattagagcactgccataaccaacaccatcaataaaaattccacgttctgccttgccttctgaaagtgataaagctgctgggtaaatatagtcagataggtgagagggatttgtattatgagttccaaagtctaaaatttcatgaccaccatcttctagaaattttttcacttcttcctttagagaaaaaccagcatgatcactagcaacaacaatcttcattctatgtacctccaatttaatttctaaatatagtataaggcaaatatgtttgttttattaatgaaataatattagtctttaaggtatttataatgatattacttaaatttaaactcaaaacgatagaaaaaaatgaagaaaaaaatgaaaaaaactaaaaattgtgataatatattattagaataacaaacaagtgtctgcataaaaaaaacattttattgatagacatttttgaagggggacattcagttggaaaaaaaagagttgtcacgagggctaaaagcacgtcatattgagctaatagctttaggtggtacaattggggtaggcttgttcatgggatcagctagtacaattaaatgggcaggaccatcagtgctgttagcttacggagtagcaggtatagctatgtacataattatgagaattatgggagaaatgctttatctagaaccattagcaggatcctttgcaaattacgcaaataaatatatatctcctttagctggatatataacagcttggtgttactggtttatgtggatagctgttggtatgtctgaaataacagctataggaatttacgtgaagttttggtttccggctttaccagcttggattccagcattaattggtgtggctattcttgccgctgctaatatggcttcagttaaattttacggtgaatttgaattttggttttctttaattaaggttgtaactattgtagttatgcttatagttggagtgggtttgattttctttggtattggtaatcatggtgtgcctattggatttaaaaatcttacagctcatggaggtttctttgctggtgggttaaaaggttggttgtttgctttatgtatggtaacggcatcatatcaaggagtagagcttattggaattacagcaggagaggcacaggatcctaaaaatacattaagaaaagcaactaaaaatattatttggcgtatactaatcttttacgttggtgctatatttgtaattgtaactatttatccatgggacaagattagtacacttggcagtccatctgttttaacttttgctaaaattggtattgcagcagcggccggtattataaattttgtagtacttacagcagcaatgtccggttgtaacagtggaatttacagctgtggtcgtatgctctatacattagctacaaatggtcaagcacctaaatttttagggaaattaaacaaggatggtgtaccagcaaatggtataagaacaactttagtttgtttacttataggtgtgatattaaactatatatatccaaattcaaaactatttgtttatatctatagtgcaagtgtgcttccaggaatggctccttggtttgtattatgcattagccaaataaaattcaggaaagagcatgcagaagaaatgaagatgcatccttttaaatcaaggctttttccatatgctaattatattgtagtagcatatctttgcttagttttaattggtatgtgctttaattcatcaactcagattcctttgtttattggtgctgtattctgtgctatcgttactatagcatattttgcttttggtatacacaagggtaaggtttcaaaagtagaagaattgcaagaataggaattataaagcatcatcgtgggttatgcctatgatgatgcttttacaaatttggattgatgtatttctaagtatcaatttcaaaaattatggcatatagagaatttacatagtataatatttctgtagaatacgaaggacgatttttgtagttgaagatttctaatataataatgggtgaggagcataaagatatggtaactgaattggaaaagtactacaataaattttgcgaggacaaaagattaacaagaaaatatggacaagttgaatatttaacttcaatgaaatatattcatgaatatataggagataatgcgaatgcaaaaattttagatgttggtgcgggtacaggcaggtattctgtgcagttggcaaacgaaggctacgatgttacggctatcgaacttgtaaagcataatttaggagttttaagatcaaaaggaagtacagtaaaggcaatgcaggggacagcactagatttatcaagattttctgaaaatacctttgacataacgttggtatttggaccaatgtatcatttatatacctttgaagataaggtgaaagcacttaaagaagcaaaaagagtaaccaaagttggaggcgttattctagtagcatattgtatgaatgaatatagtgtaataacctatggttttaaggagaacaatattcgagaatgtgttgataacggtaagcttgatagtaaatttcatgttatagcagagccaaaggatttatacgattatgtaaggattgaagatattaacaggttagataaggaagtaaacttaaagagaataaaattgattgcagcagatggacctgctaattatatgagacctgttttaaatgctatggatgaagatacctttaatctttttcttgattatcatttttccacatgtgaaagaccggagcttttaggagcaagtgcacataccgtagatattttgagaaaagaataggacaaacattagaaatcccactaatataaaaattagtgggatttttttaaagtaaggcatcgacgccatttacattagcttgttcattttcttctagaggaattacaatgcatttcttgccgtcaattatttgtgattttatttcgggtactttttcaggctttaccttaagaacaatatcatagcttggatcagactgattatcaggtgctatttcagaattggaatcctcctctaaagtagtatcagtggctgcttcttctggtatattaattttttcttctaataccgattctttgtctgaatcttctacaatttctttctttgtttgttcaagtctttcttctaatacttgtactttttgttcgagtctcttttccttttttctttgttcatttgctgccagtgcttttttatctattaaattttctactacaggaggagtatcagcgaactcttctttataggatttttcaattttctcagtgatttcttcaggaattccgctttcaactagaatatcctgaatgttatcattagttaaaattacaggctcagcatcagtaccattaacggtactattttcatcaactatgttattaagagtctcttgaatttccataaataaatgatcagatttagcatcatcactgccaatagctttacgaataatggtattaaatgcttctttttgttcagtagcagtttgtttagagctacaccctaaggcttgttccattaattcaggatgagtatcctttgcatttttcgtatagtacataatagagtgaatgtcagtactgcggtctgtaaaggctgggaatacaaatccaagatctggcggcccgactatccagtccctattgcgtgctccaattctattttcatcttcaagatatccaagagctgcttttgaaagtgatactggacatattgcgcataataagtattcgtatatttcttcagattcatctaatttagaattatctgtagttttagtcataacatcataagcgtcatgaaaaataagtattaagaaattacctgcataatcataactatctataattaagttataaaagctgtcgagaagagcagcgtcttttaatgcactttttttaaggcttaacaaagaaagctgccgactatccatattttcgccatcaaggggaaagttaagttctagaaggttatttccaactgttccagataaagcttttttagcaatctctaaatatttaaagaattcttcgtcccttagatttaaaaaggtttcattaatttttaatacgatatttttttgtgcatctacataacaaccgcacattctagtaaaggtacactcgtcttttttaaaacgtctttttaattctaatatatcctttttattcatatttaaccctctcatttcatgagtttttataaagaaactatactacttaatatagtatagtgttcaattgaaagctctgcaagtaactaaactagttttgttttgaaaaatttaaaaggatattaaaaattgatggatttaattaatcaacattatataaactttttcaactgtatttgggtaggcagaaattataaataatgatatagttaatattatgataaaacaattatttaagaaggagtatgtaatactatgaaattggaagaaagaattaaaagcaaaattactattttagtatttattgcgattttaatgtatttcctacttaactacggtaatgatgtaagaggaataataaataatatatactcgatattttttcctttcattttaggaggatgtattgcatttattcttaatataccagttacatttttttcgaagaagctgcttaattgcaaaattaaattcataggaaaagtagttagaaaatataatataagcattagtatagtagcttcatgtattcttataataggcatttttgcattgatttcagcaataattatacctaatataattcaaactattaaaatattaccaaacgcttttgataattctataactgcatttcagaaattcgttaatgaaaatagttggatgtctaaaaatgtaacgagtttggttaataatctgaatatagattggaatggaattttaaataaagtaaaaatcactattattacaggtgctagttcagtttttatgtcaacattaggtgcggcaactacttttgctagtactgccatcgaatttgtattgtcatttatattttcaatatacatattggcgcaaaagaataaattaggcactcaagtaaaaatggtattgtatgctttttttaagaagcaaaaggtagattcagctttagaagtattaaaacttactagtaatactttttcaaattttattactggtcaatgtactgtatctataattttaggagttatgttttttattgtaatgacaattttaaagcttccatatgcgattgaagttagtataataattgcctttttttcagttatacctatgataggttcaattataggatttgttttaagtgtgttattgcttttaatatttaaccctataaaagcaggtgtttttgtatttgttttcttagcaattaagcaggttgaggataattttatttatccaaagattgtaggaaattctgtagggttaccatctattttagtattagtagcaataactttaggaggaaaagttttgggagttccaggcatgattatgtctattcctttattttcagtagcttacgttttacttcgaaaagaagtttatactagattagagaaaaaagctttaaaggtagaatagggtttatagtataaaaataagaagtggattttttaattcacttcttatttttgtttagtggagcttaaattaaatattttatgcataaagcctttaacagggctattttttgtatcctttctcgcttttgttaaataacataatggtttctttgaaatgactcaacatatttgatataattattatacaatttgttgagttttgcacattatttgtcgaaaacctaggagggaattatgaggatactaatagtaggaggctgtgggttcataggctcccatgttgttgagagactttataaagaagggcataaaacatatataatagataatctttctactggaaatttaaaaaatgttacagtaccacataagttttataatttatcaattgaaagcgaaagttgtgaagaagtgtttaaggcaaataaatttgatgctgtcattgatctttcatctccagtagtcaatactaatgctgaagcttcttcatttgaattaacaccatcagttaagggaattactaatttgctaaacttttcctctaaatatggagtgaaaagatttatatttgcgtcttctgcttcagtctatggcaataataatcttactattaaagaggaagctgagataaatccgctatcaccttatgcagtaaataaatatgttggggaattctatactcaaaaatggttcgagatttatgggctgaaaacaatatctcttagaatttcaaatgtatttggtccaagacaaagtataaaaggagaaggcaatgtggtagctttatttataaataaagctcttaaaagttctgaaatagatagatttggtgatggaactcaaacaagagattttatatatgttgaagatgttgttgatgctatatataaagctctagaaagtgattatactggagtacttaatatctctacaaatacggagcattctttgaatgaattaatagacaccttagaggaatttcatccaataagaaaggtaaattacagattaaatcgttctggggatataaaaaaatcaaaattagataactcaaaggcaaaaacagaactaggatgggatactaaatattcttttagagcagccttggaaaaaacctatgattggtataagaaaaattgtagcctaagtgaaacagttagtgatacatctaaggctaagacaaaaaaaagaacgttatttaaatatctaccttattttgagaatatattatttatgcttcttattttcttcttgacttttagcatacttaaagttaaggatccattttccagtggttttgcggatatttgttatatgtatataataattatgtccattatgtatggaatgaagcaggcatcattatcggtaatcttttcttgtggcttatatttctatttgttattaaacacggggtatagtgtagttacaattttatatgatcctacaaaccttccgcatgtattaagttatattataattggggcagtttgtggatatgctgcggatgtttataaaagaaattctaaaattaaagaattaaaaattgatactcttaacaataaatataagtttctagaaacaatttataatgaaacaagaaatgcaaaggaagaattagaagaacaaattattggttcggagaacagctttgtaaatatttataatacaacaaaagctttagatagtttggaagtcaatgatatatactttggttctattaggataatagataagcttttaaatacattgaaatcatcaatatatatattggatagagatgggaaatatcttagacttaaagccaaatccagcagtgaaaactttagtttgccttattcagttaatctagatcaatttagagagataaatcaggctataaaaagtaaaacagtatttattaatagaactctaaatcctaaactgcctacaatggttgctccagtaataattaatgataatgtaaaggctattatatctgtgtatgatgttaaatttgaaaagctaactctccattatgagaatttgtttaaggccctagttgatttgatttcaaatgctataggtaaggcattaaaatatgatgaaatagcagctagaaataaatatatacctaatacggaaatactaactactaaagagtttaaaaaagttttaaccgataaaattagaaacaaggaaatctctggaataaattttactcttttgagaattaaagataataatctttcttatgaagaaaactttaataaactttctttaagcataagagacgatgatttaataggacttggtgaggggaattatatttatgttattttatcaaatacagacaagattaaatctgagaaagtgttaatgaggatttccaaaagtggattaaatgctgaagtaatggaggatctatattgatatgtataagtttttaataattcatcttttaatttgcctaatattttatgtatatatgcatattaagaatacttcaaaagaagagttactttatagattattggtagttttatttattccttgttttggtatagtatattttcttattatttatattttggataagaaaaattataaatcggataaagcattatcagattatgaggattatataaaaagtactttagaaaatacacattttaaaatgtcaaactttaataagcaaaaggatctagtacctattagtgaagcttttattttaaatagcaataaagttaaaagagaactattaattaatttggttaaagataatccaatgaagcatatttcaattttagaaaaggccttggagaatgatgatacagaggtgtctcattatgcagcaagcgcaattacagaaataaagaattattttatagaaaatatccaaaaggaagctgtaaggtatgaaaaggataaaaataatatagagatacttatatcgtatttaaatatacttaaacaatacatagacagtggatttctagagggacataatttaaataaatataagcagctgtattcagaaaaattaggagaattacttttaattaataaatcagatgctgagtattttgtaaaaaagatagactgcgatattgaacttgagaattttaattctgctaaaaaatattgcacggttttttacgataaccataaaaataatgaaaaaccttatattatgtttatgaaaatttattatttacttaatgatcacattaacttcaaaaaaactttaaaaaaattgatggaatcaaatataaagtttagcagcgatactttaaatacagtaagattttggatagcaggtgaaggaaatgaatattaaaagaaatattaggataatgcttactatagtgttatgtatagctgtattctttcaaatattacgtcttaattttgtaatgaatttctttaagaatgacaaaggaataacgaataaaatttcttatacatcagcgaaaattccttcaaatactgaaaaagaaaagtttttgattttgtttgataagaatgagcaaaatagcagtgaaattaaaaataatattgaacagatgttaaaatacatgaaaaaaactgcagtagtagaagaaaaaaataatgtccaaacggttgatccttcatatagagcagtaatattgacatttgaggacattgatgattttaaaagtttatcatcagtgatgaattatgctcaaaatggaggaaatgtgttatttgctgaaagacctgtaatgggggatgcactatcaagtatatcaaatgaaataggtataaaaaccgtaagtgatatgggtgaatctgatggaatgacgcttctttctaatgttcttataaagggtaatggtgttaatgttagtaaagatatagtatctgactactctttaaaagtaactttaaataataactccaaactactcggaatttcagataataaaattccaatgatgtggcaaacaaagtttggtagtggaaatattatggtgtttaatggaacaattttagctaagaaagaccagagaggaattattactggtgctattagtttactagttccaaattatatttatcctattatagatgcaaaattaacctatatagatgattttcctgcaccaattccttcagggtataatagttccatatataaggaatatggaatcactacagctgatttttaccgtaaggtttggtggccagatgtactaaaaggttcaaggctttataacttgaaatatacaggctcaataatagaggactataacaataatacaactccacctttttcaaccaagacaagcaatgctaatgattttatattatatggaagtgaacttgtgaaaagtggaggagaattgggcatacatggatacaaccatcaatctcttgctcctaaagattatattaaggaacctctaggttataagccttgggcaagtgaagaaaatatggtaaaagcggttgaagaggttagtaggtattcagcttcattatttaaaaattatgcttttaaggtttatgttccaccttcgaatgtgctaagtcctgatggtaaaaaggctattttaaaagcaatgcctaatttgaaaactatatcatctatttatactgatgattattataaagacacctacgttcaggaattcgaaattaaaaatggaatttgtgagctcccaagaataacctctggatactatgatgatgaagaaaccatatggaaggcttataatggcttaacttcagttggggtattttctcactttattcatccagacgatatactagatgcaaaaagaagccaaggtaagaactgggaacagcttttaaaaaattataatagtcttatgtataatatatacaaaaaatttccatggttaactgcatctacagcttcagaagcgtctaattcagaaaaaagctatagtgatctagagccgtttataaaatataataaggattctatagatatttactgtaaaaactttgaaaaaggcgataaatttattttcagaagcaataaagatatttattcagatggcagttgtgaaattgaaaaaattgatacaggagtatatcttataacggctaataaagagaagttctccattaatattaagtaggtgagtatttatgaaaatttgtttaatttgtgagggaagttatccgcatgttacaggtggagtatccagttgggttcatatgcttataaaacaaatgccagagcatgaattcgtactttattgtattgttgcagaggaaaaatctaaagggaattttaagtatgaaattccaagtaatgttgtagaagtaaaagaaatttttttggattatattttaaagcaaaagtcgtcattgcagaaaagctatccaataggtacttcaggagaggaatcaataaaaaatcttattattggtggagaggtaaactttaatattttatatgagtttttaagaagtaaggaattaaagaagccaacagatttttttatgagtaaaaacttttttgatattgtggtttctgcttatgaggataaatatcctagtataccttttaatgaattcttttggggagtaagggctatgctgctaccacttttatatatagtaagcaatgagctgccaaaagcagatttgtatcacagtgtttctacaggatatgcagggattgctggaagtttagctggaactttgtataacaaaccatttataattactgagcatggaatatacacaagggaaagagaagaagagattataaaatcaaaatggataaaaggctatttaaaggatatgtggattcaattcttctataccctatctaagtgtagttatgacacagcagataaagttataactttgtttaataaaaatagagaaattgaaattgaattagggtgtaagcctagcaagatagaaatagttgaaaatggcataccaatacaagactttgcaaatatatcttgtgagagagacacagagaacactataaatattggttctgttttaagagttgttcctataaaggatgtaaagactatgcttgaaagcttttcagttgtgtcctatgaaataaaaaactgtaacttttatctcataggtccaacagatgaagatgaggagtattataaggaatgtttgaggcttgttcgtgaattggaattaaaaaatgtaatttttacaggaagagctaacgtaaaagactatataggaaaaatggatataatggttttaagcagcattagtgagggacaacctcttgcaatgcttgagggtatggcttgtaaaaaaccttttgttacaactaatgttggaagctgtagtgagttaatatatggtgtcgatgataattttggaagtgctggtattgtagtacctgtaatgaattatgttaaaatgggaaatgctcttataaaattatgtaaagataaagctttaagacttagtatgggtgaaaatggatataaaagggcatctacaaaatatacatttgaaaagtttataaatagatacaaagatatttataagaagtatgaaggaggattataatggcaggagttggatttcaattaaagaaattatataatcataaaagtttactgcttgattttagaactttaatgtattcatcaatagtgatagttggtcctcagcttctttgtatagcagcaattgctttttttcaaattattatgtcaaatgcaaatgtttcgtttaaggataaagagttatttctagcttctacactatactgttttattttttctcaaattataacaagtggattttctatgataataactaggtatatatctgataagctttttgctaaagaatacaataaggttcttccatcgctatatggagttatatctatatgtgtattcataggaggagtaataggagctgtgttcttttataaatctccaattaatatctttactaaattctttacttatatcctttttattgggcttatagtaatgtggctagaaacctcttatttaagtgctcttaaagactatatgaaaatagtaagaagttttttaattggttttgtaacttcaggcgtacttggaattataattttaaaggttacacacataaatccaatacaaatatcgcttctttgttttgatataggagtatttattatagtaaccttgctaatgttttatataaaatcattttttaaaagcagtgaaaaggggtattttgattttctaaaatactttgatagatatatttctctttttcttatatgctttttttatacagtttctctttatatacacaattttattttttggtcgggaagtttaaaagaagttatttctcatacatacatttttgcaacaatgtatgatgtacctacgttttatgctttacttacaacctttcctgcgtctataatattttcaatatcgcttgaaacttctttctatgataagtataaggagtactattcacagattaccttaggcggtagcttaaaggagataacaaatgctagaaagagcatgatttcagtgctttaccaacaaatatttagacttatggaaatacaacttttctttagtgtagtttttattgccctaggtcattacttgcttccttttgttggattgtctcaaatttcaatagatatatttaagagtttaactcttggggcattttgttctataagtatgtttactattatattaatagatttgtattttgaaaatagaaaaggggcacttatttcaactagtgtgtttttgattttaaatgcagtatttacatttataagcttgaagctgggacaaaattattatggagtgggatactttttagcatcatttatttctgtaatagtagcctttattaatttaaataagtttttagtaaacatagattatataaccttctgttcgcagcctataatttataaagagcgtgaaggaatatttagtttaatagttaataaactgtacaaggtatagtaaaaagacttatgcttgaaatctaaagcataagtcttttttaattatatttagtttaagctaaggctgctagaaatataaactttaaaacctaaattgttgtagtagttatgaataattttatttaaagaagtatctctagagtattcaactatataaattaatatatccttagattttaatttttctaggtatttaacttttttatctctatcatctctagaatttttaatgaatttattgttattaaaatctactgtggtatatacactttctatattgataccgtgtatcaggcttttaagtgatatttttttattctctgctgcttcaaggaaatcaactcctccgttaaatattacaggaagattatagcttgaatttaatccctttattatatttagtaagccaataaacatagagtcttttttatactttgagtacacatccaaattgtctaaaaaaaaaccatctacacctttattttttagattcttacctaaggtgttaacaacataattgtcccatttaaggttgcttacatctatccagctttcatccttccaattttcataattgtccaaagttatatctttaaaatcactgtagtatggcctgaagttctctaatgaaccaacatttaaatagctataaacttttataccttttttatgtaaaaagtcaatttgggctttgctgtagtatgaagcgtctattactacttctttatatgaaagcaacctatttatatttttaggttgtaaaccagtaaaaacaccataagataaggtattagaatttttaattcttattcttaagtttatcaaaatcgaaaatattacaacaaaaatcattacaacaataattaatttttttttcattagtttcctcctgcgtccagtattcataaaagcctagaaatattttaccataaataaagggctataaagaatattttgataaactcaggaggataaaatatattaatataatacacagattttatatatttgtttaagtggtcattcgtgttatttttaatattgcaagttaaaatccaagagaatacatggcttcagcaactttagtgaatccagctatgttagcgcctgcaaccaaattatcttcgaagccatattcatttgcagcattactgcactttatatatatattcttcattatattttgaagcttagtatcaacttcctcaaaagtccatgaatagcgcatactgttttgagacatttcaagagctgatgtggcaacaccaccggcattagcagcttttgctggcccgaaaatcactttgttttttataaataaatcaacagcttctattgtagatggcatattagcaccttctccaacagcatagcatccattggcaattaaagttttagcagaattttcatcaatttcattttgtgttgcacagggaagagctatatcacatttaagtttccaaataccatcgcagccttcagtataagatgcattaggatgatattttgtgtactcatgtattctttttctttcaacttcttttatttttctaatagtatttaaatttattccattagcatcgtaaatatatccatttgaatcactcatagcaacaactttagcaccaagttgagttgctttttgatttgcataaatagccacattacctgatcctgaaataataacagtagcaccgtcaaaagatttacctttagcctttagtgcctcattcatgaaataacataatccataaccagtggcttcagtcctcactaaacttccacctaaggttaatccttttccagtcaatacgccagtagattcattacgtatctttttgaacatgccatataaatagcctatttcacggcttccaactccaatatcgccggcaggtacatctgtatttgctcctatatatttattaagttcaagcataaagctttgacaaaatctctttatttctgaatttgatttgctctttggattaaaatcgctgccgccttttccgcctcctattggaagaccagttaaggaattcttaaagatttgttcaaagcccaaaaactttactattccaagatttactgatggatgaaatcttaagccacctttatatgggcctatagcactattaaattgaattctgaagcctctgttaatatgctcttcgccattgtcatctacccatggtaccctgaaaataatctgtctttcaggttctacaattttatcaaaaattttgtcttttacccattcaggatgtttttctgcaactatctctagagataggagaacttcttttactgcttgatgaaattcaggttcatttggatttcttttaataacatcatccattacatgctttaaaatttccatttttccctccaatttatttaaagtattaatagtaatatttatgcttatgttgatattaatattggtgcctttaatgactagaaatattattttaatttgtgttgttttataatatttattcctttatctccttacccatacgaaggttaaatacattagaaattttgctttattgtaaacattaataaaaaattcaactcaatagtaaattatgaagtataatagtcataggaaaaaacatagtgataaaaactaagaaaatctggaggaaggaaatgaaattcacagctatagattttgaaactgcaaatgaaaaaagaaatagtccatgttcaattggtattgttgttgttaaggatggacatgttgtagaaaaatcacatcatttaataagacccaaggaaatgaggtttatgccaatcaatattggtattcatggaataagaccagctatggttgagaaggaaccagaatttgataaggtatgggaaaagattaagcactattttgatgacactttagtgatagcacacaatgcttccttcgatatatcagttctaagaaaaagtgctgagctttataatatagagcttccagagtttaattatatttgtacaatgaagcttgctaggaacttttataaaggcattgaaaatgcaaaattgaatacagtaaataattttttgggctatgagtttagacaccatgatgcattatatgatgctcttgcctgtagtaatataatgcttagtatatcaaaagaattaaaatgtaaggatataactgaaatatctaaactgttaggcgtaactgttggaaaggtagatagtaaaggatataaaccatcacaaactaaaggaattgcagtaagaacatcagatagaatttatttttctaaaaaaaagagtgcctttgaaagattaaaagctgatgaatttaaaaatgaggttgtggtgtttactggaagactagattctatgtcaagagacgaggcaatgggattagtcaggagacttggaggtacagcaggaagttctgttacaaaaaaaactacaatactagtaaccaatatgaaaaacataaaaaatttacgaagggaagaaatgagtaacaaactaaaaagggcatcggacttaaatgccagaggacagaatataaaatttttaaatgaagaggaatttttaaagataaaatagataaagtattaatttagaagtttaataatataatagttttgatattatacttgtaacctatatataggttaattaaaaaatcatactaacataattattttgcttgaaaattttggatttcattataactaatttttaagtttgacacaaatatgtatctactttataatttataaagtaaaataggaaaaagtgaggaagcgaaaacaatatgctaagtgttattaaaactgcaattgcaaccataataatatcaattatatccggattattactagaatacgttaaaaacgttaaaaacgtggctcctaaaatattgtgtactgtaggaaaatgtgtatccttacagatgaatggaaagaaagtttttgcatatattgttactgttagtaacatgtcaaaaaatacagttcatgagttaaccttgaacatacaaagccaaagaggcagccttaatattgctgatgcaaaaataacaaaaggattaaaatttgattcttcaatagaatataatactgttgacatttccatgccttttttaagtaaaggtgataagttttcagttacagtatatgtagaaactcctaataaacctcatattgtattaagatcacctgaaaattttaagcaggtagattccatggatcaaaaaggggtactagcttcagtatttagtatgcctaaaaatgtagctgaaacaatcttaggttcaaaggatgaaaaaggtggaacaggtaccaatagaggacttagtaagaataaaaaggtaattttagctgttgcatcaattgctctagttattcttgctgcagttgctgtaaaattaagtttccaagatgattcacctaataagacacaagctaatagttcaaaagctaatactgaaagcaagccagcaaatacaacaaagcctacaggaagtacacctacaacaagtacaggttctaatgattcaaagagtggaagtagtgtgaattcagaaactaatccgtcaaaatctggatcaaacaaaagtacaggtacaacttcacaaagtggtggaagcggtacaggtacagatacaaagcaaagcacaggtagtggaacgaataccaaagagagtggtaatagtaatagcaatacgaatacatcgagtggaacaagtacagacacaaagacatcaacaggtgaaacaacaggaggttctagtacaaattcaggaacaaatacgtcaggcggaacaacaaatacaaatcaagatactaaaacatcaggtagtggaacaagcagtaattcgggttcaactactacaacaaatggaacaacttcaggtaattaaatttgataaattactaaatacaagtagctttaaatatgttataaaatttaaataataaaaactgtgttatttttggcacagtttttattatttaaaaatagaaaaatgtttaaaataatgggggatactaaaataatttggaggaaagaaaatgagaattttaattatgagaattaccttaagagcatcctggtgtcattctttaaaggagaaaaggatggtagtaaggagtattgtccaaaaactaaaaaataaatttaatatatctgtatcagaagtagatgaacaggacattcaccaaaaaatagttataggaattgcaggaatatgcgaggattcagcaaaggaagattctacaatggagaagataataacttttatagaagaaaatactgatgcagaaatagttgatatagaaaaagatgatgttattaaataattatttactaggaaggagggataagttgcgtataacttaaattttatgaaagtgtaacaatgatggttaaacgaagtttatgatatttcgttcttgtgaaataagtcgaaaacaatataaaaaattataaagatatgttttaaatatttcgataaagtaagcataagtaactttggtgagagtaggttacacttaactaaaatttaaggagagagcattatggaaaaggatattatgcagtcttttaaagatgtactaccagttttgtctgaactaatacaggaggatgtagcgactaccatagtaaataaagataaaattgcagttgcagtatatcacaataataaaatccctattagtttcaatacaggagatttagtgccaaacgataatcctttatgcatagctatggaaaagaatagggtaatatctgcagtagtacctaaggaggtttacggggtttcatttaaggctatagcatatcctataaatgatagtaatggaagggtcgttggagctattggcgtaggaaagagcttagaaaataaaattaaaatagaaggaattgccgagaatttattttcttctcttagtcaaataaatggtgcaattgatgaaatagcacaaggttcacaaaggctttctagtgttattgttgatgttttgtcagaggcaaatgttacaaataataaaattaatgagacagattcaacaattggagccattaaaaatatagcatctcaatcaaatcttttagcgttaaatgcagcaatagaagcggctagagcaggagagtcaggaaaaggattttctgtagtagctcaagaaatgagaaagctatcacaaaatagtagtgaatctgccaaaaaggtttcagaaatgcttctagagatgagaaattccattcagtcaattataagtcaaatcaatgaagtaaatgtagttgctgaaggacatgccgcagctacagaagaaataaatgcaactatagatgaaataactacagcatctcaaacgcttgtggaagagtctaaaaatatataatttaatttgccctcgagaataatcgagggctttatgttttttacaatgaaaaagagaagaatgcataattccataattgtattaattaactgtagttaacaatagtttaaccgtgtgataacaataaggcaatcatttgcatatataatataaaaggtaagttgagtgagctagtactttcataagtataacattcttagaaaggaaatgatttacttgaagtttaagaaaacttttttgtcattagctcttacttttatattatcccaaagttattcaagcgtacttttagctcgtagcgtaaatggtaatgaaataacttcacatcatgcagtttatgggtattttgtagatgagtggaaaaataataatacaaacaatatgagtccaagtactaatccagccattggtgtactttctggatacctaaagttatggaagccaggtatttcttatgataacggaataaagcttaattctgatatcttaaacttaaatattcaaaaggttatacaaataacttatcgacgtacaagttttcaggagcatcaagcatatcttgatgatagaagaaatcaaaattacagtgtgttagatggtttggggccatataaggatgcttttataaagggggctggagctggaactacaataactgatgttattcctaaagatgctattaatgttcaatatacggataaaggcaatgctgaggggaactgggcagaagaaagttctgatttaggaagtgtagttaaattagtagatactattcgcaatagtgcagcatcaacaacacctgctaaaaattattataagtatcctcgtccatggcgatggagtgacaaggttaaggttctacctacacttgttccggaaaaaagtactaatccatcatcagatggaggctttccaagtggacatacaaatgctgcaactatagatgccatagctctagcttatgcagtaccagaacgttatcaggaaatgcttacacgtgcatctgaacttgggaatgatcgtatagtagcaggaatgcattctcctttagatgtaattggaggacgagttatggcaacagctattgccgcttctgctctaaataatagggataacacagcaattaaaaatgctgcatatttagatgctcaaactaagcttattattaaagaaaatgcaatttcaaaggataggtttggtaactattctgaaaacaagaaaaattatactcaaagattaacctatgactttcctcaaataggtgataagaataagcctatggtagttccaaagggagcagaggttttattagaaacacggtttccttatttagatgcagaaaatcgcagatggattctttatacaacaggtattccatctggatatccagtattagatgattcagaaggctggggaagaattaatctttttgcggctgcagatggttatgcctcttttgtaaaagatgttacggttacaatggatgcttctaaagggggatttaatgctgaagatagctggatcaatgatatttcgggtaatggtaagcttattaaaaatggaactggaaaattaaaattaaaaggggataataagtatagaggaggtactgaaattaatggaggagatttagaggccgattctaagaaagcttttggagatggggatgttgtaaataattcaggaatgcttactaaagaagctgataaattaaatattagggggaaatatgtacagttgggaaatggtactttagaactcaatatttatagtaaaaatgatgttcttagaataaaagatgaggcaaattttaacggggtattaaaattaaattttttaaacagatatgtgcctacgaataaagaagttattataaaatgcggcaaaatagggggaagattttcatcagttgcaacagcaggacttccaagtggggatagggtgaatattttatataaaaatgatcaggttgtactgcaagttgtcaaataagaaataaaagctgctgagtttagcggcttttattgtaaataaagttatttgataaacaaggcagtgattgacatgattaaaattctatgataaccttatcatagaattaaatttaataaaaataaggattgttactggtaatgcaggctatacctaaggaatgtgtagagaatactctaatacatttcttaggtattttttataaaatcagatatataaaatttaggaggaataactatgggagttaaatttccggaaggatttttatggggaggagctacggctgctaaccaatttgaaggagcttataatcaagatggtaagggcttatctattcaagatataatgccaaaaggtataagaggacctataactgataagccaacagaagataatatgaaacttataggtattgatttttataacagatataaagaagacataaagttgtttgcagagatgggctttaaaacctttagattatcaattgcgtggtctagaatattcccaaatggtgatgataagcagccaaatgaaaagggacttcaattttatgacaatgtatttgatgaattagctaagtataatattgagcctttagttacaatatctcattatgaaacaccattagcacttgctaaaaattatgatggttggactaatagaaaactcataggcttttttgaaaattatgttaggacaatatttaatagatataaaaataaggtaaaatattggctcacttttaatgaaataaattcagctctccacgctccttatatgagtgctggaatatggacaccaaaggaaaagttgagcaaacaagatttatatcaagctatgcatcatgaattacttgccagtgctcttgcagttaagataggtcatgaaataaatccggaatttaaaataggatgtatgattcttggagtaccaaactatcctcttacttcaaagccaagcgatgttcttaaagcaatgaatcaggatagagaaaatcttttctttgcagatgttcatgcaagaggaaggtatccaaaatatatgaatagattatttaaggaaaataatgtacatataaagatggagccaggggatgaagaaatattaaaaaatacagtagactttatttcttttagctattacatgagttcatgtgcaacatccgacactaaaaagagtaagggaggggcaggaaatattatttctggagtgccaaatccttatttgaaggcttcagaatggggatggcaaatagatccagaaggattaaggtatatactcaatttgttatatgatagatatcaaaagcctttatttatagttgaaaatggtttaggtgctgtggatgaattaataacagatgaaagaggtaacaaaaccgtaaatgatgattatagaatcaactatctaaatgatcatttggttcaagtaggagaggccatagaagatggtgttgagctaatgggttacactacttggggatgtatagatttagtaagtgcatcaactgctgaacttaagaaaagatatggttttatatatgtagataggcatgatgatggaagtggtacattagaaagatataagaagaaaagtttttattggtataaggaagttatagctacaaatggagctagtttaaagaaataaaaagatagaaaaaatagcttaggcacacagcttaagctattttggtttttgtataatgtattatttaagagagtgtgtgtctatttaggcgtatctttaaaaacttattggagtatcttaaatatataaaatatataataggaagcatatataaataaaatgcataaggaatatattttattgcgcttacgtttagggttgttgttggtacaagtgcagatatattccaaggaataagggctgcaattattattccggaattttcaagatctagtgcaaatcgatattttccaatgtttttataggagtccttcataatttcattagtcataactgaactaattgtttgattgcacccaaaggccgcagtcataatgcttactatcgaaattacgctaaatagtttgtgttttgttaaatttttatttgtaattactttcttgaagctattaaatatgtttaattccttaaatatgcctgaaagagagcaggaaacaaacattactaaacatggttgtagcattgaaacaatgccaccgccctttaagacattatgcagtggactatgagggcttgtttgaaatccaaggataatgaatttaattatatccaataaattatgctgttgaaagactaaagcaaaaattgaggctataataatgctaatagaagcagaaaaataaagtttaactttaaacagtgaaagtataagtataattatagctggaaacaaggtaataaatgctatattaaatgtacctgaaatttcgttagataaattgctattcatattcctcaatggttgtgatatggataaaatataataaaaaaataatgacagtgaaaatggaactattgaagaataaatcatgtttttcatgttagtaaatatatttgttttagttaaattagcaactaaggcggcactacttgacattggtgaacatctgtctccaaaataaacaccagcaataatagctcctgctgttatatttaaatttacgtgtccacttcgtgctattatcattaatgggattccaactacacttatgcttcctaatgaggtacctattaaaaatgatactatgcagcaaattataaatgagaaaaaaataaataaagaaggagttaaaaattccaagcaataatacacaatcgcagctattgtccctgaagccatccatacacctataactgctccaattaaaagaagaatttttataactataaatgattgctttcctccattgtaggacatttttataatttcttttattgtatagcccttttttattgaaattaatgcaaaaaccacccaacaagtaattaatgcatatcctataaagatgccttttattacactaattataagcagacagaaagaaattaaaaatcctaataaaatttccatgtgtaccctccaaattgtcatattaattatttaatatcctaaagaccatgtattattgtagcaaaaattgatatataattaaaatatctaataaatataaaatttatatatatttatgtataaataatagggggtaaaatggatataaagcagcttacatatttcattagcatagcagaagagggaaatataacaagagcagctgaaagactgcatattgcacagcctcatcttagtaatcaattaaaacttcttgaggatgaactcggtgttatgctagttaagagaactactcgcaggattaagcttacgaatgcaggagaaatgcttttacatagagctaaacagatgctagagttgagagatagaacaattaaggagttgaaggattttaatgagggacttcaagggacactgtcaattggagctatatcctcagcgggagatattctattgccaaattggatttataactttcataaaaaatatcctaatatagattttcatatacgggaatgtgatactcatgaggtattagagctattaaataatggtttaatagaagttggaattataagaactccgttaaattcagaactttatgagtcaattttacttccggatgaacctatgatagcagctgctaatgagaatatgttttggagagatgaacctaaagttattgatatgaaggatctttcaagtaagcctttattaatgcatagaagatatgcaaaaatgataatagaggcatgtgagcagtctggctttgaaccaagggtacttggaaaaatagaagatacaagagctatattgttgtgggcaaatacgggaatgggagtagcaataataccgaaagattggattggaattattccaaatataaatttaaaatacgctcaaattaaaaaatcaagtttaaaaacaagaactgcaatagtatggaaaaaaggggagtacctttcagctgcggctaaacattttttagaaaactgcaaacacttcatggacaaacaataaagtaaaacattttttaataaaatatactgctcattaatttttggtaatgagcagtatatttttagattttaaattactattttaatttaagatcgatgtttgcatgactgccatcatttgcttggtcaattacattcatttttaaaccgaagtgtgggagtataacacctacgtctggaagttcttctgtaatataaggtctatcatcttcaaaagtaggatgttttgaaataacatcatcagttaaagtctttggagttgaggtattactgtaatctataaacatttttctggcttttcttgtagtaaaagctgcatcatgcagttcatatttgttatcagctagtgttccgtcgctccatcttaataaatgttgatcggcatctacaacacttaagaagccgtgacctggatgaatgcctgtccagttatcgctataaagattatctacataccatacaactacaccaggatcataagacataagacttgcaccacgttttatatgtccaagtccactgtcagtgccatagtgatttctaagttccattaagtagtattgatctgtaagttttataccactatctttagtgaagccatttaatgtgaatctacttgtggctccttcagcatcatcaataaaagcttgttttccatttatattaagggctaaatcatccacataaaaaccgtccatatcgccaccagcgtctgtccagtaatttagttttaagttaatttttttgccgatatagtctttaagatcaaacttagcatcaatccaaccattagattttccagtgataccatttccagggttctgattgtttggattagtacttgtagtgatatttcctggaatgcttgtccaagtgtttgcaccgtctacttgtacttgtacagaagcataatcccaatcttgttctatgttgtaccaagttttaaagttaaaatccgcagaagtagcatttgttagatctatagcagtagacatagagttgtttaagttatcacccttaccgctaaagtaaagatagctaccactagaaggttttgttattgtagtggatttttgtggaagagtaaccttaacaaaatcattatttactgatttttcactagcagcatctaaagtgtattttttacccttcttatttaaagaagataaatctatagtgtttccatgaaaccaattaccgccatatcttttttggaaatattctttatcgtatgcgctaaaacctgaaggttcagttccaggtattgttcctgaccaacttccacttgacataattgaccaataacctacaggttctcctttacctgaatattgagtatcatattcgtcaggaagacctaaatcatgtccaaattcatgacagaatacaccagcagctccgtcctcaggcataatagtatatgggtaggcagacatatctgtacctggtattttccaaggttttgtagtaccattatccatatcataaacttttgaactatgagaccatattgcatcagttcctattgaacctccacctgcttcttctcccattccggaatgaataatcataaggtggtcaattattccatctggttcgttaaggtttccatctccatttaaatcgtaaggatcttttacatcaaattgttttagatctatatgtttagcaacttcggttaaagcttctttaacaagatcacgagcacgtgggctgttgtcgcttccttgatttttaccatagtaagctgctggatgttgagctttataccagcctacaacagttccgcctatatcatagctcccacctgattgctgattgtaatattcttttaaagaaactaaattttcattatgaggaccggaatatccgttagggccaaatatcatatcctgataatgtgaggttgtatagtctttataatacatatctgtatcctgcggagttaaggtattatgaggtaagtcagggaattcaattaaaattacaagagccttgtcctttgttacagttccatcccaagaagtttgaggaccatttcttttgctttttttgtcagctttctttagaattcctttattaagagcatctttactgtatttctttaatccttgaattgacttcatatctaatttgttaggatcattgctgtccttgccttcatgttttgctaaatagttattaagaattttgtcagtttcttcagcagttgcatttttgggaattgttccgttcttttttaacatttgtattaacttatcatcattagcgatggcattatcagcgctggccgaagagtttgatgaaattttacttttttcttgtaaagaattatcggcataggctttgatagttaaattggttgttgcattaaaagtaattgctatggctgtaagtaggcctaaaatttttgtttttgacataacaagtttcccccttttttaatctacaatgtaaagtgttaaagtatataataataaactaccacaaaaggtactaaatgtaaatagacagttttactataaaattacttatttgttgataaaaaataatatttttttaaaatatattaatattattctaaaaattaagcgtgtattataattgtttgaaaaaagttgaattttgttatgtatataatatagataagttataataagtcatagaatgtttctacagaaagaaaataataataattaaaaaaaacttagcatattagcatggacatgaggttatataattgtgtaaaataatagtgacacataaaaaacgatttaactattaaaaataattttcgaaaattattaataggttgttttaagtatggttatcactacataaaataaaatgtatggttcattataaaaaaattattagctttaaacctagttgagaaggggatggatactacggaaacagagaagaagaaaagcaagcgcaataaaattatcataggtgctgcagctgccttttgtattttacttgtcatatatttaggaatggccaggtattttacaaatcatttttattttggatctaaaattaatgatgttagtgtttcaggaaaaactgtagatcaagttaagactgaaatggaaggtaagctaaataactacaccctaagtataaaagagagaggaggaaaggtagagaacataaaggcaaaggatattaatgtaaagtacaattcacaagataattacagtagctttaaagaaaaacaaaatccctataagtggattgtaagtgtctttaaaacaaaagattccaatatgaaagatgaaatttcatatgatgacaaattgcttaaacaaaaaattgataatttggcctgtataactggaagttcagtaatagaacctaaaagtccaagcttcaagtatacagataaaggatatgaagttataaatgaagtaaagggaaataaaattaataaggatgccctatatatgaagataagaaaggctatttctaatgaagatagctcaatagatttggagaaaagtggagtttacattgagcctaagtacacatcaaattctccaaaggttaaggagactaagggacttttgaataaatatgtggcttcaaaagtgacctataatctaggaaatcataaagaggatatagctggagctgtaataaataaatggcttaaggttgatgatgatctcaatgttacaattgatgaaaaagaagaaaaaaaatatttaaatggaatttttagtccttataatacagcaggtaaaactagaagctttgctacctcatcaggagctacaataaatgtcagtggtggtgactatggttgggttatagatgcttctaaagaagctcagacattaaatgaagccattaagaagggacagactatagaaaaacagccaacctacagccaaacagcagcatcccacgatgcgaatgatattggcaacacttatgtagaagttgatttgtcaaaacagcatttatggttttataagaatggatctttggtagttcaaggagatgtagttacaggtaatgtgagcgaaaatgatgcaactccagcaggtgtatatagattaaaatataaggaaagaaacgctactttaaaggggcagggctatagctcacccgttagctattggatgccgtttaacggaggaataggaattcatgatgcaaactggagaagtgtatttggcggagaaatatataagactggaggctctcatgggtgtgtaaactcaccatatgatttagctaagacagtatttgaaaatattgatgctggcaccccagttgtttgttattattaatatttattttaattacaacgcactagaaattttagtgcgtcttttattgtttataaagtaaatccaacaagatatataatttgaagtttatgtgtaatgtttctaaagatcaaagctcagggactttaagtatcttaaggaagaaccagttttatagtagcgcatagattaattattataggtatgcaaataagataattgttatagatggaggtgaaattattaaaattgtaaaccataaggagactataagtaaaaaaggtaagtattattatcaaatgtattttaatcaatttaagaataatgaggaggataattaatggatttgattggagcaattgatgttaggtgttcaagaagaaaatacacatctgatttaatagatagcaataaagttatacatcttgaaaatttaattgaaaagataaataaaaaggcaaatttgcatcttcaattaattttaaaggatggaaaggcatttgagaatataagaaaaagttatggaatgtttagcggagtacaaaattatatagcgttagtgggtaaaaatgacaagcttttaagagaaaaagtaggatactatggagaaaagattgtattagaagctactacaatgaatttaggaacttgttgggtaggaggaagttttgataaggaagcttgttctgctgaaattgaggacaatgaaatcttagttggtgtaataactataggaaatgtttctaaaaatcttagtattaaagaaaagcttatatttaaggcaattcataggaaatcaaaaaaggtagaagaaatgtgtgagactaaaggagaagttccagagtggtttaaggatggaatgatggcagttaaaaaagcaccttctgctataaataaacaaccggtaagattttattttgaaaattcaactgttacagcagttgtaaagggagataatgaatatgaacaaatcgatttagggattgcaaaattacactttcaaataggtgctaagggcggaaaatggcagtggggaaatggagctcagtttactaaagaagtataaaaaaaaatctatagcacaatctaaattgaaacataaatttggaggagtgcataatggatacaaagcaaacttttttagaagacttaaaaagtagagataatataaagttatctttaatggtaatgaagataatattcagagaaaccgataagcttatatgtatattggcagataggacgggcgaaataaaggccagtgtacctttaaaagatggtgacataaagcaaggtatggtaatacaaataaatggcagtaaaaatgtaaatctagaagttaaaagttataaaattatacgggattataatatttcagattatcttcctacagttaaaaggccaattgaagatattatgaatgaaattgaattatacacaaataagtatgttctatctaaagaaggtagagcgttaaatgattatttttttaaggatgaagagtttttagagaaatttaaaaaaggcataggtggagtttctatgcaccataattatattggtggacttgcagaacatacactgaatgttatgaaaataactgctaagctttcagaaaagtacaaatgtagaagaatggaagtggcagtactagcagcaaagcttcacgatataggaaaagtttatgagtatgattgtaacggcccttttaagtatactatgagagggcaaatggaggggcatattgttattggagtagagcttgtagatagagcagttagagaaaatttgaatctttatccggaggattttgtaaatagaataaagggatgcattgttcaacatcatggtaagctggagtttggttctccaagagaaatgaatatggaggagtcttttataattaattatgcagattcaatagatgctactatgaataaaatatctcagttaaaggaaaaaacagagcctgatacatggtctgagtttgatagaagaattgagaggaaattatatttataaaaatgaagtgcaaaagctaattttgcacttcatttttattatccacatagtatatattgaaagaagggataaatgtggataaaaccaaggttaaaatagataaagacaatagtgaagcaggtgaccaaagcttaaatacaattgtgaaacaagctgaacctactgagttgatgcaggaatcagctaatcttctatttagaataccagtatttttaagtcatcctagtagattaaatacagtgcagcagcaatttgtagatgcaataataagacaaattagaaaagcgcttctgtttcctcgaacgcttcctataagcgaacaatatccagaaacacctctaaccaatattcgtagaatgattgcatctagctatggaatggtgtcacttaatctcagacaaagaagagttagcttaatagaaaacaatcttaatcaacctatagggggagatgtttgggagggaagtccttttgcccaaatagagcctggaatggcttatcaatatggtcttcctctacttctaataagggaaataggtgtagaacaaaacggaatttggtcttttggaattgcaccacttttaatattggaatgggattctacagcagtaaatcctattgaaactttctttagaagaaatgattggaaatcaatttttcaaaattggattggtgaagtaagaacaggttactatattcaaacacagccacaatttcaatattcgtgtaaacaggataattaaaaaataagcttgtattgtttaattgtaacaatacaagcttttatgtactttattccatcattttttctaattttttattcaatgctaataatactaaacctattaggatagcaattacagctattccaccgaatatttgcagatgtcctaaagtttcagtgtatcctgcaacaataccagctaatttattagcaacaaaattacttagcatccatactcccattaaaagtgatgcgaatttagcaggtgcaagtgaacttaccattgaaagaccaactggtgataggcaaagctctccaattgtatgaaaaaagtaagcacctaccatccaaagcatgctagcttttatagcagtatcagtagagtttccacctctttgcataaccgctcctaccataagtaagaaacctaagcctaaaagtattaatcctaaagccatttttgtaggtatacttaaatctccatttttactagaagctaattttagccataattttgacataggtattccaagtatcaatatgaaaagtggatttagtgactgaaaccaggacactgggacctcaaagctgccaacatttctgtttaagaaattttgagtataaagggtaaatgaacttcctgcttgttcatagcctgtccagaaaattattacgaaggctgctaatatgcatataacaatagttctgtttttttcttgtctagttaaaggtctatttttgttctcggcattagtaccagttttaattttagtaactggtactttacctatatcgccaaggaatttatttgataaggaattaaaaataatttgtcctataatcattccaacaccagcaactaaaaaaccatatctaaatccgtaatgtataatttgtcctgcttttgttgttgccattactgtttcagccaaagttccgcatattagtggggcgaaaaatgaacctaaatttatacccatataaaagattgtaaatgctgagtctcttcttttgtctccatctggatataagtgaccgactaaagttgaaatgttcggtttgaaaaagccgttaccaattataagtaaaaatagtccaatatataaggctgtcatactttgactagagaataatgtaagctgtccgatagccattattattccgccaatagttatcgcctttctttgacccaaatatctatctgaaatataaccaccagctattggggtaagatatactagagaggtaaaggtaccgttatataaggctgtcatactttgactagagaataatgtaagctgtccgatagccattattattccgccaatagttatcgcctttctttgacccaaatatctatctgaaatataaccaccagctattggggtaagatatactagagaggtaaaggtaccgtacaagcttgtagcagttgcatcgctaacaccaagtccaccttgtacaaattttgtggttaaatataataccaataaagctctcataccatagtagctaaatcgttcccacatttcagtgaaaaaaagcatatataatcctggcggatgttttgttttgaattttttgttttgcaaagtttcatttatagttatatcgtttgtctgcctaatcgtcataataaaccccttttctctattttttgtctactataattttatcaatcaattttatattctgcaagtttatggatttttgttttcaaaatgattgttaaggaaaaccttgaataaaaattaattaaataaaatattaagtaaaaatgtgaaaaaaaaataataaaaaaggctattgtttgattaaatgtcaaatgttgattttgcataatttaaatgttataataaagcattaaattaaaactgtgaggaaaattattatgtaatttaagtagatttatttaagcaaaattgaagacaattatcaatttattaaaaaagttgcttttttatgggttcgtttttgcaatttgatttttattttgaatataatttacttttttatcacataataaaattcttaaaaagaatatctcttttaagtttattagtgttgtgaaaaaggtaagaaccgcagcactttttttgttgcgtaaatttaaaggagatgaattatatggaacggatttacaaatatccaaggacaccacatcttgaaggatcaagatttcagcagggtgatgaggatttagaaggtataaaatttgaaaatattaaaaatagattttgtgtacttgaagagaaggtagatggagcaaactgcggtataagttttgatacaaacggaaaaatgtatttacagagtagaggacattttttaaatggtggatatggtgaaaaacaatttgatttatttaaaacttgggcaaactgtttcaagtgtaggctttggagtattttgggtgataggtatgtaatgtatggggaatggctatatgcaaagcatactgtattttatgataaattaagccattactttatggaatttgatatattcgataaaaaagaagaaaaatttttaagtactaaaagaagaaaagaaatgcttaaggattatggttttataaaatcagtgcttgttttaaaggaaggaataataacttcaaaaaaggaaattacaacactattaggaaaatcaaattttaagtcacataattggagagaaaatttagaaattagatgcagtgaattaactttatcctatgaaattgcaaaaaaacagacggatttaagtgatttaatggaaggaatatatataaaattagaggatgaagattatgtactcagcagaatgaaatatgtgagggcctcatttttaaatacaattatggattctgaaactcattggataagtagacctattattcccaatagattaaaagtaggaataaacatttttgatggtgaggtatagttatggatatggaaggaattttaaaagaaaaaaactacaactttaaagaaatagtaaaagaatttagcataatagaaagactaaaaaaagtaaagcaaaacccagaatatcatggggaaggaagcgtgtacaagcatactgagttagtttgcagagagattttaaagcttgaggaatggaaaactctaaatgatagggaaaaagtcgttttatatacttcagcattatttcatgacataggaaagctagttacaacaagagaagaaaatggtaagataatttctccaagacatgctttaaagggtgcaaagatgtttagatacttggcgtatacaaggtatgaaatagaaaatagtataagggaagagtcagcggctttaataaggtatcatggacttcctttgtactttcttgaaagagagaatatggattacgatattataaaggcagctgaaattactaatatgaagctgttgtatttattagctaagtgtgatttacttggacgtttttgtaaagataaagaaattatgcttgataacatagggtattttaagacatattcaaaagagctaggctgtttttatggacgaaagaagttcaaaaatgaatatacacggtttttatattttaaagaaaaaaagattcatcctgaagcagagatgtttgataacagaggtttcggggttgtagcaatgatggggttgccgctagctggaaaagatacttatataaaagaaaattttaaaaatatcaatgtaatatctttagatgacattagagaagagcttaatatttcatctaaaagaaattcaggaaaagttgcagcaattgcgatttctagggcaaaacagcttctaagaagaaaagaaagttttatttggaacgcaacgaatttaagaagagagaacagacaaaagttaataagactatgtacagcttatggggcgaaattaaagtttatttatttagaagttccttatagggaattactctcgagaaacaaaatgagaagcaggtatgttccagttgaagttataaataagatgataagaaaaatggatatgcttgaaggagaagaaatttgtagatgatataacttcaaaatacttattaataaattactcctgcagaaccatacaaggttttctaggagtaatttatttttttgcgtattagtcctaaaatgaatacatattacataaatgcttagttaattacttgcgttataatagtttttttaatatgatataataaaagtataaaaaatgttacatatatgtctaaaaataattgcattattgtaaaataaatagtatattaaatgcaaactataaaagatattagtgtatttggtaagttatatatatttatgtagtaatttggaggatgaatgcaacaatgcttgaggaaacaaggaaagaccaaataggtgtagtattcttattaagaaaagaaacatcattaaataaattaagagcgttagaaattcaagaaattatttttttaatttgttctgcaagattttttaaatcaaaacaaacaattgcgagtaatatttttaaagaaaaaattgagatttttatgaaggttttattagaaaaaataagaaatgctaatgaattatttattatgtatgatgaaaatactgattacccatatatagattctaaggatagagtatggatattttcaaaacaagaatatgcagttgttgttaagaattattttgtgaaacaatcgatacgtcttaaagtaaagagagtaaacaaacaatgtattctggataactttaataatttacataggcttggaataaaaaaaataatagtagataatggtcaatataaagttgagatagacagaaaggatatattacctccccctcatattggtaatacgatgttgataaatattccgatagaaaatcctaagttgcagtacagtatgataaagttttttcaaaatctgtattctaaagatgagtatgaaggaaagcaggaatttatccatgacttggagagaaaaatgttggatgagatagtaagtgctaagtatttagttccagtaaaagttggaacagcagctcccataatctcaagagagcaagtaaagactatattaaacaaaaaagatactgagtttgcaagcatagtagataaggatgatacaacttggcttccggcttttactgattgggaggagtttgaaaaggtatatcataaaaatatgtggaggggatatataacttcctacgatggtttaatgaaattatgtgttaaaatgcatggtgtggttgtaaattgtagtggagtttcactacgaatagatgaaaacaatagaaaaatgttagagatatatgaaagaggtaaggtcttaacagaagaaaagaaagaagagaaaaaagaaatagttaagaaaaatcatgattcaaaggatacagaaatcacactttgtgagcctaaagagtatccagacgaaatgatagaggctgttaagcagtatatggaaaacaggaaatccatcaataaagcatatataagacttatgacaaagaatcaggataaaagctaccttatagttgtggactataatgaaaaggatgataaggtatttgatgaaattgcagaggttgcagttccttatttaagaggtatgcatttagacatggttcaaatggatgcttgggccaaagatgcacttatagatgttaaaccattttataaaaaaaagctgtttggaatattttaatatgtaaataaaatcctcggtgatataccgagggttgttttatgttatacgaatttaatctgagtagggcttatcaaataaagcacttattttaataccgtttcgttttgcccattttttccaaaatatatgtccgaaaataaaaaatagtcttctaggtattttgggatttacaaaaatattattaatttcaattgagacttgattttcaatatcataagtgattttatttatagatttataaacacagctgcttagtttatttaaaagagggttgtttttagaaaaattaacaaattcccctgcaccaataccaatgccaaatctaaaatttatatttaattttttgcagcagttgaaaactatttttagtgcttctacattcatttttgcatcggggaaaccacagtttactacagcatataggttagtcttttgacttatagtatccttattttttaagtagatataatagtcttctaaaaatcttactagaagacttggcatagaatagacatatagtggaaaggctagtataatgtaatccgcatctagaagtgttttaaaagtagactctaaatctccttttatactagaagttgtgtctatataatatttagtgtaatttttagagtctaatgacttgtctattaaatttaaataaagagttgaattggctttttttgatcttggacttccatttataaagcatatatttttcatagttcctccattatatttatataatttttttcaaatcatcaagtatttttttgttgtcctctattttaagagagtaaaagacatctctataattacgtccgtgattatcaattaaatcttgaaaagtgcttttttcttcttttgttacatcatcaccataagctacaattatttcttttgggtttttttcatatcttagaggatgcttaattactccattaataactttgaagaaaggtaaacaatagggttgagctctgtctataatggttttaatatttgcactgtattgaccaaaaattatgggagttaaataaataactatatcgctatttatgtaacttttatttacttcagacattgaatccttaagaacacatttgcctggtgtttttatccaacagctaaagcagcctatacagtgcttaaaactgtttctcccagcttcaataacttttgtttcaaaatttttgtaagaaaaaaactcaagtaaatctttttttaatacttcgctaggaattgttctcttatccttatcacagataagtaatattttcatttagatcactcctcaatttatagaatagcttttgtagaatctttgaaaaataagttgaaacaattgtattataattataacaagagatgggtttagtgcaaatatattactaatggattttaaataatataaattagactctacatattaaagaattatggtaatatattatatataaattttaataatgcaaaagaggaaggtgaaaatgaagaaatttaataattttataagaaagacattgattatagcactcatggttctattaataagcggacaaaaagtagctgtattagcaagggcaggaggtggaagctcaggtggtagccatggcggttcatttcacggaggttcatttcatggaagttcactaggtgggagaggttcaggttttattggtccaattgtaattggaataaatgcaggttttatgggtcttatttttgtagtaggagtaataattccaaataaaattatgcgtaaaaaaaagaatgaaagtatttcagcaataaacgatttatctatagacgataataattggaattatgatgaaataaaaaaggatgtagaagaagcattttataatattcaaaaggcttggatggagagaaatcaagaattagctagagaatatatgagtaagaaactgtacgataaacataaagctgaaactgaaagtatgattattaaaaaagaaaaaaatattttagataatgtacaattgttagaattttatccagtagcagttgaagattacgaaggtacggataaagatagcttttggttatatataaaagctaaggccatagattatacaataaatgaggaagacaataaggtaatagaaggatatcaatccgttagtgttgaatttgaagagtattggaagtttataagagaagaaaaaagctgggtggcagatgagataaagcaaacaaaagatgttgtggacttgagcttttttaaaatacatatagataataaacaagattattctatagagtaaagacaaatgattatataatattaatttataataagagggcactaaaataatagtgctttttttataaaataaattattttcgtaacgaaggataccgaatttaaaaaaagttaatcatataattagaacataaattaaaagaaattcagaaaaccaagtgtgaaggttaatagttcatatggttttactataaaataacggaggaaaaggttatgaaaatttcaaaagatatgactataggagaagttgttagaaatcatccagagtgtgtagaggtgttatttaattttggattaggatgcgtaggatgtccgtcagcacaagcagaaacaatagaagaggcatgcagcgttcatggaatggatgttaatgaattagttgaggccttaaataaggaggctaaatagatgagtgcattcttggggaaaattcattattggctttacaataaaattcaattgcatgaagctttaatagaagatatagcaaaacttgcagataataatggttataaagctgatagccttataagcgaaagttactcaaaatatggtgagcctatagtaggttcacttgaagataatataaatcatagtaatatacatggatggcttcaagaaagaataataagtgtagaaagtagattggcatatattataactaatttgttaggggataacattgttaaaaaagaggatattgctcatattttttatcaaaatggggtaaatacaatgaaggaacttaatgtagaagatgggacacctgaaaacttttttaaccttatttttgattacatgcttgaaggaatgccatgtgatagggtaaatgaaataattgaaaacagcgaagagtctattagttggagaactactagcgacttgcatagaacttattgggataatgttcatggagatgttaagaattttaatgattttagagattcgtggattaatggtttttttagtgaaagtcctgctgggtataaatactctagaaaagaagatggaataagtacaatagaaaaggtgtgatcttatggatggaattgctttaatggttgatgaacacaaaaatataaagagaatgcttaaggttataagaaaagtttgctttggtattatgaatggaaaagaagttgaatatgaagactttgaagatatcattgattttgtgaggaattatgcggataagcatcaccatggaaaagaagaaaagtttttatttaatagaatggttgatgaaataggtggagcagcggagaaattagttaagtatggaatgcttgtagaacacgactttggaagactttatatgagagaccttgaggaagctataaataagctaaaaaatggtgatagtgaagcaaagcttgatgttatagctaatgctgtagggtatacaaatttattaaatagacatatagataaagaagataatgttgcatattcgtttgctaaaagagagcttagtgaagagacattaaatgagataaataaagaatgctttgagtttgaagaagaaactaataaggaaggcattcaaaataaatatgctaaaatactagaagctctggagaaaaaatataactaaatttatagtaatgattaaaaaagctttattaaggttaagttaatattaaaggaagtatatgatattaacttaaccttatttttatattgacacaaataaggaattattattcaatatagtatataataatttaaaattaaggagtttctgatatgataattattttaattatgtctccttttattgtaattggattgattcctttattagttggattgcattattataatgaggggaaaaaatatgcttctgaatcaaaaattatagaaggagaaatagtcgatattgtaaagggagttaaagttttagatagtccacaatcatggtgtccggtaatcaagtactgggatgaacgtagtaactcatatttgctctataaatctagcacgggacatacccttaaaagcaaatatacaattggtaacaaaatcgaattaagacacttatatactgacaaaggagttgatattcgcgccaacacaccaatggatgtgtatgggttaagcagacaatttatggttgtgggggcgatcattactagcatcagtgtcattattatgatagctttcttaattattctttaagtaaatttacttagagtgtataataatagggttttagaacttagaaacaagttctgaaaccctattattatatatttatatgaatattcttatacaagacaggtattgccactgttataagtactatacccataaaagcgggggtggcatgaccaagtgatacgtagatttgaccaccaatgataggtccgatcattcttgctaaagcttgaatagattggcttcctccttgaattcttccttgctcgctagaatcaacagacttggagagcatcccattgaaggaaggtccgaagatggaatcaccaaaaccaaatataaacattccagctataaagagaggatagaaataaaataaagctgatgctgcaatgagactgtaacctataacctctgaaatcattccaagaatcgctatatatttgtcgctaagttttactaaaagctttggcattattaaactttgtgaaatgatatcttggaagcccataattgaaaacataagtccgattatagcaggcttccaactaaaggtatctattgtaaattgtgaaaaaacagcctgtaaagatccgtttggaatccaaagtaagaatgctgagataagaagtcttttcaagctttttatggaaagtaaatttgcaagctgtgtaaatggatttagtcttacaaaggttatctcttttagcctgatatttttgtcgaggctctcaggcataaaaaagaatccgtaaacaacatttaataaagttattattgcgccaaaatacaggggtacagaataaccaaacttggcaagtaatcctcctagagttggaccaatgatggtgcctacaccaacaacggcacttacccatccaaagtattttgttctttcgttttcaggaatgatgtctgcaaaatatgcgaatatagtgcttatagttcctccagttataccatctattatgcgcccagcaaataaaacccatagagctcctcctatgccaaaaattaagtatcctattgatgaacctaaaaggcatactaaaagtactggacggcggccatatttatcgctcaaagcgccaagcccgggagctgaaaagaacatgcaaattgcatagacagaagttaaaagtgtaacaattatagcttggtttcccggattatttatgtaaggctgaactaaaaatgggattacaggtgatatgatagtaaaacctattccagaaagaaatacagatataagaccgaatattaaagcgtgtttatttatagtttgttttgtattattgctattgtgtgatttaaatttagacatttgaattctcctctcaaagttattaattttgtttcctgggaaacatgtttatcatatcaactttttgtttccatgtcaacaaaaaaataaaaatgcagcctagtttaaataaaattagactgcctatcattttactattaaaatttactctaacttagtatctataccaagtttctttatttctgaatccaaatgtttgctgtacttttctataaagctaagcatgctttcaaattgttcatcggtaacctgttcaaatacaactttatccctctcttgaaactctttatgtagattttcatgaagtttataaatttcatgacccttttcagtaagtctaaaatagatttccttcttattatctgccttctgatagctctccacaatattcttttctataagcttttttgtcattttacttatggctcccctagtcatataaagggactttgcaagctttgtaacgttagaatctacattttttccaatgcattcgatgtaatgtacttcagagggtttataccctttaagactatcttccatcttaagtttattgagccaagccattttgttaaatagttcccttaaactcatcatgacttgttcttctttattcatagtccgtcctcccatcctttggtagattaacaatattatattaaatttttgtttctatttcaacaatattaagataattatttcagtattgagttgtagcagttgttttagttctacaataattttaaattgaagacatgaaaagactaaaagcctataggaaagttagttgaaaatatagtgggtttaggaaaataaatatactaagcgggcgtgattaatagagtatctattctttttaaagaattaatttattatataaataatatagtaaattatttgattaagacaggagaaggctttgtaagattataattgcaatattaagcgtactgttttattataagattaaggtataattaatactacttggaaagtaaaatttacttgatagtaaaattatgttttgcaaacggaatttataaaatatgcgtaagaaaaaggagagatattaattattatggataaccctaatttattgtcagaagaggcaaacagatgcctactatgcaaaaaccctagatgtaaagcaaattgccctattaatacacccataccagaaattataagcctttataaagaaggaaaaattatggaagcaggagaaattttatttaataacaatcctctttcagtaatatgctcattggtctgtattcatgaggatcaatgtaagggaaattgtgtaagaggaataaaaagcgagccaataaaatttcacgagatagaagaagagatatcagagaagtacttaaaagaggccaagcttaagaatgttcagaaggacaaggatagaattgcaatagttggaggaggtccagcaggaatcacagttgcatttgtacttgctaataaaggctataatgttaccatttttgaggctcacgataaaataggaggagtacttagatatggtattccagagtatagattgactaagaaattagtggataagcttgaagaaagacttatagaggttggagtgaaaattagacctaatactgttattggaccagttatttctttggacaggttacttgaagattcatataaggcagtatttattggaactggagtatggaatccaaaaaccttagatgtaaagggagaaactttaggaaatgttcattttgctattgattatttaaaatctcctgaaagctatagattaggaaaaaaagtagctgtaataggagcaggtaatgttgccatggatgctgcaagaactgctaagagaaatggtgctgaggtaacaatactttatagaaaaagctttaatgagatgccagcatcaaaacaagaaataagagaaactaaagaagatggagtagagtttaaattatttagagcaccaattgaaataacagaagagggtattaaagtagcatttacagaaaatgttacagatgcagaaggaaaaataagaactaaaattattgaaggaaaagaagagttttttgagtgtgattcagtagttgttgccgtaagtcaagcacctaaggataatatagtatctaatacaacaggcttagatactaaatggggattaatagtaacagatgaaaaaggcaatacaactaaaaaaggaacctttgcatgtggagatgtagttacaggagcaaaaactgtagttgaagctgcagcacaagcaaaagtagttgcagaaactattgatgagtattgcaagaataattaaattaatttgaagtgaaatttggaaactacagaataaaacaatttataaaagcttttagagagcttgaattttaataaatatatgccatcaggttaataagctggtggcatttttgatttcttaaagaatgtagttagaaaattgaagttaaaaaaggcacttgacttagagttaactcaaagtgctacacttttattgaaagagttagggggtctagtatggagttaatgaacgaaaaaaagtttgggttcggatgtatgcgtctacctttattagataaggaagatcctacatcctttgattatgatttaattaataaattatttgatatgtatttagaaaaaggatttacttattttgatactgcatacacatatcatggttatcatggtgaagaaggagtgcgtaaggcattagtagagcgccatttaagggatgaatttcagttggcaacaaaattgccactgcgtgattttaaagatagttgtgatatggaacgtatttttaatgaacagttatctaattgtggtgttgatttctttgatttttatctactgcataacatggggtcaaatgtctttaataaatgcgaaaagtatggtgcttttgactttgtagctaaaaagaaagcagaaggaaaaattaaagttgttggaatgtcttttcatgatacaccagaattactagataagatattatccaaatatactgataaattagattttatccaattgcaaattaactatgtggattggaatcagccaaatgttaatgcttgtgattgtttagaaattgctaataagtataataaaccagtaactgttatggaaccttgtaagggtggaactcttgtaaatgtaccaaaggaagctgaaaaattaatgagagattataatcctaattattctattgcaagttgggcatttcgttatgcagctagtcaaaagggagtatttcgtgtattaagtggaatgaacactatagagcaagtagaggataatgcttcatttatgcaaaattttgaacctttaaacgaagaagaaatggctataattgaaaaggttactaaaataattaatgaaaatacagcggttccatgtactgcatgtgaatactgtacacatgggtgtcctaaaaatattcctattccaaaatatttttcactttacaacagtatcatgcgtactactgatagtttttcaagtcagatggtgtattataataatattgctattaatcatggaaaagccagtgaatgtattggttgtaaacagtgtgaaagtgcgtgtccacaacatatcaaaattactacacacttaaaagatgttgtagaaaagtttgaaaaaatagcattattcctactagaaaaatttaagaaagataaaataagttaggaaaagatataaattatataattggtatgtgtttaacagtaataaattcatgtaaacaaaagcattacttttgaagggggaggttatatgacaattaaagaggtaagccaaaaatatgatatttcagctgatacgttaagatattatgaaagaattaaacttattccagcagtaaatagaaatagcagtggtattagagattatacacatgaagattgtaaatgggttcagtttataaagtgtatgcgcagtgcaggactttccattgaagtattaatagagtatgtaaaaatgtttcaagaaggaaattctactattggtacaagaaaacagcttttaatagaacagcgcagtcaacttgttaaaaaaattaaagtaatgcagcaaaccttagaaaggctagacaaaaaaattgatggttatgaaaaaaggatattacttagagaaaaagaattaaaatctcagtaagacatcataaaaaagtttaaaataaataggaggaagttattatatggaaacaaaaaaattgggtttcggatttatgcgtttacctctaaaagatcaaaatgatcaaggaagcattgatcttttagcagtaaatcaaatggttgatacttttatagagaggggatttacctactttgatacagcttatatgtatcatacaggtaaaagtgagctggctattaaggaagctttagtaaaacgccataaaaggaacagctttactttagcaacaaagctgccaacaatgttcttaaaagaagaaggcgatcaagaaagaatttttaatgagcaattagagaaatgtggtgtggattatttcgattattaccttcttcatgcattaggagagaaaaactatgctacagctcaaagatttaaaagctttgagtttattcagaaaaagaaagaggaaggaaaaataagaaatataggtttctcttttcacgatacctcagagttattggatgaaattttattagcgcatccagaagtggattttgttcagctgcagataaattacttggattgggaaaatgaaagtgttcaatcaagaaaatgctatgaagtagcaaaaaaacataataaggcaattgtagttatggaacctataaaaggaggcaaacttgcacaggtgccaaaagaagcagagcagttattcaaaaactatcatcctaatttatcagtaccctcttgggcaattcgttatgtggcaagccatgataatgtcatgatggtattaagtggaatgtctgacatgagccagctgcttgataatacaagctatatgatggaatttaaaccacttaataatgaagaatatcaagttattgaagaggcagtagaaatcatacataaatccattactgttccttgtacagcctgtcaatattgtgtagagggatgtcctaagaatatacctattcctaaatatttttcattatacaataaggaaaagcaatacttaaatactggttcatctaagcaaaaatcagattataaagaatatataaaaatttacggaaaagcatctgattgcataggatgtaagcagtgcgaaaagtcttgtccgcagcatattgaaattacaaaatacctaaaggatgtagcaaattcctttgaaggtagatggctttaactagaaaaatatttctaaagttaggcttttataaaatttaaagtgtgagatattttattgtagattactaaacgaaataataagaagataataccattggtttttgtaggaactaatggtattatttttgaaataaaaaaacaaatatgatatattaaaaagttaggaggtgttttaaataaaagagttgcctagcattcaagaattagagaattttataatttacgggaaagtacgaaattttacacttgcagctaatcaagcaaacataacgcaatcagcctttagctttcaaatgaaaaaacttgaagagactttgggagtaaaactcattttacgttctaatagaggtagcagtttaacacctgaaggtgaaattttctataagaagataagtgaaatactgccagaattggtgggagtaatttacgaatttcaacaaataaatggtgaaaaagcaatagaactaaaagtaggggtacttacatcacttggagacatactaatgaatcaacacgtcaattattttcaaaagaataagaacatactaattacagtttatagtatggaaaaaaatgaacttatacgcgctttaaataatggtaaaattgatattgcatctacctttctttttgatgatgagaccttagaaaattttgaaaagtccctatttagaaaggataagattgtatattatgcgccaaaaatcaaagaaatatctggcactataaaaagggacaatatgctaaaagtgccattagtgaaatatccgccggataatttcatgaacaaaatgattgatcagtattttaatattgagaggaaaatgccgacggtggcagcaaaattaccatctccatatgcgttcattgaatattgcaagcaggacactgctggagcatttattacagaacgtcttctcaatacacttgggtttaaatataagcaagaatactttaacattgacccaccgtatgaaataaaagcctttctactatataaaaaagaaaatccaaagtatagtgcgataaaaatatttactgattacgttgtaaaattaaatcaaagggatagctaatatttattacagctgatataaaattaattttgttatgaaatttttttatgtcagccatttttttatttggctatacaagtatattccattgaactataataatctcgacatacaaaaaaagaaatttttagaaaatataaagggaggatgaataagttatggagtatgttaatataaaattaccttatgataaaaaacaaattactgcaaaaatatataagagaaatttagctggtattttagtttcaaaatcagaaaattataaaaatagtctatcagagaaggagcttgttgaaaaatctcttgataatcctattgcttcacctaaactggaggaattagtgaagggaaagaaaaatatagttttaatcagttctgatcacacgcgtcctgttccttcaaaaattattacacctattttgcttcgtcgtattcgtagtgttgaacctaatgcaaacattattatacttgttgctacggggtttcaccgtccatctactcatgaggagttagtggataagtatggtgaggaaattgtaaaaagagagaatattgtaatgcatgtttcaactgatgattctgctatggtacaaataggtactctgccatcaggaggtccatgcattatcaataaaattgctgcagaggcggatttacttattgctgaaggatttattgaatctcacttttttgcaggtttttctggtgggcgtaaatctgtattacctggaatagcttcttataaaacaattatggccaatcattgtggcgagtttataaattcaaataaagcacgaactggtaatataaaatgcaaccctattcatgaagatatggtttatgcagctagaacagccggtcttaagtttattttaaatgtagttcttgacggcaacaaaaagattattggctcttttgcaggagatgtagaaaaagcccatgagacaggttgtgatttcgtaaaggatttggcaagagttaaaaaagtgccttgtgatattgcagtgtctacaaatggtggttatcctcttgatcaaaatatttatcaagcagtaaaaggaatgaccgcagcagaagctacaaataaagaaaatggtgtaattataatggttgctggatgtagggatgggcatgggggagaaggtttttacaaaaatcttgctaatgtaaaaacacctgaagaattcttagaaaaagctattcatacagaacgccagaagacaattccagatcaatggacttctcaaatattagcgcgtattctttcaaagcaccatgtaataatggtttctgaccttgttgatcaaaagcttatttgtggtatgcatatggagcttgtttcaaattttgaagaggcactagagcgtgcttataaaatagaaggaaaagatgctaaagtaacagttattccagatggactttcagtaattgtggaatagaatttttaatataaggagtagataataatgcattatagtttagctgtaaagttagtttgcgaaatgcttggtacagcaattttagtactatttggtaacggtgcagttgctaatgtagaattaaaaggaactaaagggtatcgcaatggctggattattattgccattggttatggtgttggtgtaatgcttccagctttaatgtttaataaaattagtggtagtcagacaaatccagctatgacaataggattagcagtaaatgggctttttccgtggtctgaggttataccatatatattggctcagtttgtaggtgctataataggtcaagttattctttactttatataccttccgttttataaacaaacagaggatactaaaagcattcttggtacatgttctactatatcagcatcaggaagtcatataaatggatttgtcacagaattttttggcacattcttattggttttaggtgcaatgtttattcttaattcaactggagtaaaaagtacacctgcagtaggttatgttggtcttggatttcttgtatgctcattagttgcatctttaggtggtccaactggtcctggattaaatccagctagagatttgggccctcgtatagtacattcacttttgccacttaaaaataaaggcaattctgaatggacatatgcctggattcctgttttggcaccaatgtttggaagtattattgctatattcttgtttaataaaatatattaataatttcatacttaatacaattacgtcgtatatttattactataattataagttagctatcttttaacataaaggtgtaaatgttaaatatataatttagaattgtttttttatatagttaacatttacacttattttatactatttagagtaggctcctgtgttaacataaatacgtgtatttaatttgcatatcaaggttaaattgaaatttttttcaaagttacttgacttagagttaactttaagtcttataatattattattcgcataaataaaatttatttgattcagggggagataaatttatgcatatacctgataattatttgagtccttcaacctgtgctgtttttggggcatttatgttgcctgtatggagaaatgcaataataaaagtaaaaggtgagatttcaaggaagaaaatgcccctacttggagtagccgccgctttttcatttttagttatgatgtttaatgtcccattaccaggaggaactactggccatgctataggaggggcgcttgtggctattttacttggaccatatgctgcagtgcttgcagttacagtagcacttgtaatacaagcgttatttttcggcgatggtggtattttggcaataggtgtaaactgttttaatatggcgtttataataccttttgtatcatttaatttatttaagatgataaaaagattttcaaagagtaaaaaaggtgagtatttcggagcgtttttttctggatatatagctgtaaacctagctgccttatttgcagcaattgagtttggtattcaaccactgctttttaaggatgctttaggaaagccactatatagtccttatggtttaacagtatctattccatctatgttaataccacatttgttggtggttggatttttagaaggaattataacagttggagcgtacagctatgtaaagaaagcttctcctgaaataatatacaaggaaaacaatagtaaaaatagatttttgtacgttatactggggctacttattttggctaccccattaggacttttgtcgagcggtacagcatggggagaatggaatgtaaagcaaattaaaaatcttataggttttacacctaagggaatgaaaaatggttttaagtttaattcactatttcagggatataatgtaggtaatttaaaggactatattggatatatattggcagcagtggttggagtagtaataatactaatgatatttaaaattttagagaaggtaaaaaaggagaaagtatgattccaaagtggctttcagaaaaggataaatatattcctaaggaagaaaaagactcctatgtagaaaaaagcatttattcattaatcaaaacaatagcaataattaagcaaaataaaaatactaatggggtaatatactcattaaatcctacactgaaggttataagtaatatagttcttataatatgtgtggcgatatcaaggaatataggtagtttattagtaatggacgcatatgttttgatagctctattttttatagaaaataaactgagaaaaagaatattttttagaagccttatatttcctattataacctttattgcattatttccatccattctttatggaaatgcttataatagtgtacttatcgttcaaaaaataataataactataatacttgtaaatttattatcacacactactaaatggaacgaggttaataaatcactaaaattattatttgttccagatatctttatatggattatggatataactataaaatatattgttgtcttaggagagtattctatagacttgttatatgctttaaaacttagaacagttggcataagctataataaatataattcattcacaggaatcatgggaaatttgtttataaaatcttataagatgagtgaagagatgtttagtgctatggagtgcaggggatttgtaggagaatacgttacaaaagcaaatttgaaattccaaaaaaatgattatatatacatgataataaacttaattttacttattatattcatatacttaagattcattcatttgcaatactaatagaatggagagttattaatgataaaattagagaaagtttcatttacatataagaatagggcagctttgtgcgatgtaaatgttgatataaatgagggggaagctgtggctattataggtcctaacggcagcggaaagtcaacttttttaaaggtattgaacgggattctttttccaagcagtggtaggtatgtatttgacaataatgaaataaatgagaatacattaaaaaacaataaattcttaaagttatttcataaaagagtgggatttgtattccaaaattctgacgctcagttattttgttctacagtatttgatgaggtggcatttggaattatgcaaatgggacttgaaggagaagaggtagataaaagggtgagagactgccttaagctgcttaatatagaaaagttaaaggaggaacatccatataacttaagcggaggagagaaaaagagagtagctattgccagcgtactagccatgaatccagaggtgataaccttagatgaacctatgaatgcaatagatccaaaaggaaaacgctttttaaaagagcttttaatagatttaaataaaagtggtaagactataatttgcgcaactcatgattttgaatatattgaaggagtatttaatagagctgttgtattttcagaaaatcataaaataataagagatgatagatatgaaaatattataagcgatagagagtttttaatggaatgtaatattatatgataaacattggacaagtaagcggttaagagtaagaggagtgataaatatgaggatattgtattatgattgtttttgtggaataagtggtgatatgaatttagcggcacttgtagacttaggagttcctaagaaatatttaattgatgagcttttaaagcttaatttgggatcggaatacgaaataaaaattgaaaaagggcaaaagcttggaataacaggaactagagtagatgttatattaaaggatgaacatcataacaaacatgaattagaagaagttttacataatcatgagcataagcacaatcatcacgaaattaaaaacgatgaaccagcgcacagtcatgagcatcatcatagaagtttaagggatatagaggaaataataaactcaagtacattaaatgacaaggttaaaaagcttagtttaaatatatttatgaaagttgcagaggcagaggcgaaagttcatggaagagaattatatgaagtacattttcatgaggttggagctgtcgattcaattgtggatattgtaggggcagctatttgcatagattacttaaaagtagataagatacttgcatctagagttcaagttggaggaggctttgttagatgtgctcatggaattatgccagtaccagcgccggcaacagtggaaattttaaagaatatacctataaatactggtatagttcaatttgaaacaaccactccaacaggagcagctatacttgcagcaaatgttaaggaattcacacaaaagcttgatttcataattaaaaagacagcatatggaatagggcatagggatctagaaattccaaatgttttaagagtgtatttaggagaagaagagagctttcaagatatagaaaatcaatatatacttgaaactaatatagatgatatgaatccagagatttatggatatgtggaggaaaagctttttaaggtaggagctttagatgtatttaaaacacctatatgtatgaaaaaaggaagaccgggaataaaactcagtgttttgactaatgaaaagtcagaaagagaagttttagatgttatttttgaggaaactacatccataggagttagaaggtataaggttgaaaaaataatgttaaaaagagagttttcaaaagtaaaaacagaattcggagatattacagtaaagaaagcttattataaaggcgagcttgtgaagtacaaaccagaatatgaggagtgcaaggatatagcaagagaaaaaaatgtatccatacataaggtatataaagcagtatataaacaagatttaaaataatattagatgagaggtggaaaataagtgataaataatgaaaaatataaggaactaataaagtaccttaaaagcttaggaaaagtagttttagcattttcaggtggtgtagatagtacttttttgcttaaagcttcaaaagaagcccttggagataacgtaaaggcagttacaattttatctccatatattccaaagtgggaaataagagaagcagaggagttagtaaaggaattaggagtagaacatgaaattataaaagcacctattattgattcaattaaatttaatccagaagatagatgctatttatgcaaaactgcagtgtttagcatgatattagatgcagctaaaagacagggatatgattgtgtaattgatggtacaaactttgatgatataaaggattatagaccaggactaagagctttgaaggaattatcagtaaaaagtcctcttttagaatgtaaattaactaaagcagaaataagaaccttttcaaaggaactaggacttaaaacttgggacaaaccaccatatgcttgtcttttaacaagaataccttatggaaatgaacttaaggtagaagattttgagaaaattgaaagagcagaaagatatatgatgagtattggctttagagctattagagtaaggtgtcatgatgacttggcaagaattgaagtcgctagagaggataggagcaaattgtttaatgaagagcttttagatactatctcagagaatataaaaaaatgtggatttaaatatgtatcattagatttgcaaggatatagggtaggaagcttcaatgagactatagccaaaatttctgataaataaaaccttgggaggaaaaactgttggataaagaagagattaagcttttattacaaggtgttagagataacaaaatagacatagaaaaagctcttgaagaactagaggatttaccttttaaagatttagggtttgcaaagatagacaatcatagagaaattagagttggatacccagaagtaatatattgtgcgggaaaaacagtgaaacaagttagtgatattgttaaatttatgcttacaaaaaataataatattttaggaactagggcaactgaagaaatgtataaatcagtaaagcaaatatgtgctgatgcagagtacaataaacttggaagaacaataactattagaaaaaaagatgaaaaagttacagatagttatatagctattgtggcagcaggaacttctgatttaccagtagtagaggaagcttacgagacagcaaaaatattaggaaataaggttgaaaaagtaattgatgtaggagttgcaggaatacataggcttttttctaaattagatgttattaagggagctaaggttgttatagtagttgcgggaatggaaggagctttagctagtgttgtaggtggattagttgataaacctgtaatagcagttccaacaagtgttggttatggagcaaattttggagggatttcagctttattgtcaatgctgaacagctgtgctagtggtgtgagcgtggtaaatatagataatggctttggtgcggcttataatgccagtatgattaataaattatagagagatttctacttttaaagtgaagattataaatgtaatttaaaacaaagacaactaggaagtggttttatgaaaaaatgcattgtagtagtggaatagtcaaaaaatagcacaataaaaaggagagaaataaatatgactattccaaatttaaataaaatatatccaagaagtaatgattaccaaactgtatatcttaaaaatgttattacaagaaaaaatatagaagttggagattatacaatctataatgatttttataatgacgcaagagattttgaaaaaaataatgtactatatcagtatcctataaatggtgataagttaataattggaaagttttgttcaattgcatgcaaagcaaagtttcttatgaacagctcaaatcacagtatgaaatcactatctacctatacattcccgatattttatgaagaatgggatttagacgttaaaagaataacggaggcatgggataataagggggatattgtaataggaaatgatgtatggataggttatgatgctgtaattatgtcaggagtaaaaattggtgatggtgcgattattggagcaagagcagtagttactaaagatgttccgccttatactgttgctgcaggtgtaccagcaagggttataaagaaaagatttgatgacgacgtgatttcaaagcttttaaaaattaagtggtggaacttgccgtacgaaaagattagagaaaatattcaatattttaaatccggaaacattgataaattaatttaagttaatgtgtaatttaaaggtaggctcatattataataatatatgcctacctaattgcgtccttataaatatttataaaattattaaagaggtttttataattaacatataatagatataatataattagagtaataatataggggaggtatatatgaagaaaaatggtgctcaaagagaatttaaaaaattaaaaagtcaaattaatcaaattgaggagattgtacatcattcaaagccaggtgcacttatagagcatgaatctgcaataagaaaaaagttaaggcagctaaaggaatttgagaaggaaggctttagagattttgattatacatatgataggtataaagagcttttaaatgacaccggtaaaaggatgcttgaatattataataagaaaaacggaacaaattttgatttttatgaggttttagaagagaattataatgctttttataattcaggacttatgacagtactcactaaacatcatattcctaagcttatagcaaaagaatttgaagaaaaattcccagataaccctaaaaatgaatacattgaaacacgcagaatgcatagaaagttctatatccatctaggtgatacaaatacaggaaaaacttacaatgctgtagaacgccttaaaacagcaaggagaggggtatatctatcaccattgaggattcttgccttagagaatttcgaaaaattaaataatgaagggattatttgcgatttattgactggcgaagaggaaattttaaaaccagattctactcatatatcctgcacaatagagaaggtagatttaaaagagcactatgacatagcagttattgatgaaatccaaatgatcagtgattatcaaagaggaatagcatggagtaaggctcttcttggactaaagtgtgatgaaattcatatatgtggtgctattaatgcaaggtatatacttgaaacaatcataaaggattgcgaggatgagtatgagataaaggagtacaagagagctattccacttgaagttgaggatgaaagctttaactataaggatataaaagaaggagacgctgttgttgtattttctaagaagagagtgcttgaaatagctcaaagttattctgctagaggcattaaagcaagtataatatatggtgatttgccaccagaggttagaaaacttcaatatgaacagtttataaaaaaagagactaaagttttagtaactactgatgctataggaatgggagttaatctacctatcagaagaataatttttataaacataagaaagtttgatggagaacaaataagggagttaacttcacaagaagtaaagcaaataagcggacgtgcgggaagaattggaatttatgatgttggctatgtggcaagtgcaggagatactcaagattttattaaggaaaaattagaggaagaggataaaagtataagaagagctgttattggtccttctgaggctatacttaggattaaaggactgcctttaagtgaaaagttagctttgtggagcactagacaagaaaagttagattactacaccaaaatggatataagtgaatatatgatgatattggataggataaagaaatataaattaagtgaggaggttcaatgggatttattaaaggttccttttgatgtatcaaaggaagaattaatgagcactttctcgggatacgtagttgagatttttattaataagcaggacagtatatttaaaccagaatgttttagagggagcttagatgagcttgaaatttactatcaaaagataaacatgtattactcattttctaaaatattcaatttggaatttgatgaagagtgggtttatagtgaaagaataagagtaagcgaagatataaataatatattagtaggcatgtaagtattaaaaaattaatttaaggtgtttttcgcaccttaaattgatattagattagttcgtgttaatactgccttatcccttgttccaggactattaatcatatgccaggcagtgtattgttcagcatagggaacgtctgcggatacagcatcaacaggaacaattacattataattacgaagagcagcaccagtagcagtatgaagaactgctccgtttgcagcatagcctgtaactataacatttttaatgtttttttgttgtaatatttcgcctagattagttttatagaatttgtccacaccagatcttacaacaagatccattggcagaggagctaaaggtttaattacatctaaagcagtagctgttggtctaaggctataaatgactggtatattgttttcgcgagcctttacaagtaaattacgaattttaggtatagaagctctacattctggatttgtacatagtgtattttccatatctaatattaaaagtgcagtatttctaggatcaatctttactggttttagcgtaggtgcaggaggtgtagaaactgtattccagttatctataattgttttgtcttgtctttgaaacccagtatatctaaaatcatcatttaagtaattgaaagcgtttctatgaaaggggcaaaaatatatcacagtaatcctcctaatatgagtttgtacgtttatatagtatgtgatatgcaatgatgttgttacttccattttcgattaatgcaatgtgttgattttttattatttatatgatagtattggtaaaaaaatatatttaaatgcattgaagagaaagagtaggattacctagagcttttacagagagcttccgttagctgagaggaagcaagaataagtattctgaatacatctctgagcacctcaccaaagctttcaaactagaaggtggtaggctgaaggcgtattcctttccaacgttaaaaggatagagtatcatgtatgaattctatacatcgtacttgaaaaggttagtattgtgagatgctaataaattaaggtggtaccgcgaatgtaactctcgtccttattaattaaggatgggagttttttttatataaaaatataaaggagaaaatataatgaagaatattgatgaacaaataaaaataataaaaaagggcgcagaagaaataatagatgctaaagaattaaaagagaagttaataaaagcagaaaaggaaaatacacaattagtggttaaattaggacttgatccaagtgcgcctgatatacacttaggtcatgcagtggtattaagaaaattaaaacagcttcaggacctaggtcataaaatagttataattataggtgattttacaggaatgataggagatcctacgggaaaatcaaaaacacgaaagcagctatcaagtcagcaggttatgaaaaatgctgaaacttatgaaaagcaaatatttaaaatattagataggaataaaactgatttgaggtttaatagccaatggttagaaaaattaaattttaaagaggtaattgagcttgcttcaaaatacacagtggctagaatgcttgaaagagaggacttcaaaaagaggtttaaaaatcagcaaagtataggaatacatgaatttttttatcctttaatgcaggcgtatgattcaatggctattaaagctgatattgaatttggtgggactgaccagagatttaatcttttaatggggagaactcttcaagcagaatatggagaggaaaaacagatagctatatttatgcctctgttagaagggatagatggaaaagaaaagatgagtaaaagcttaggtaactatattggtattgaagaaagtgcaaaggatatgtacgtaaaagttatgcaaataccggacagcttaataattaaatattttgagctttgtacagatatgcatccagacgcaattgatataattaggaaacagcttaatgaggataaagttaatcctagagatataaaaatgaagcttgctaaggaaattgtttgtttataccataatgaagcagaagcccttaatgcagaaatatactttaaaaatctatttcaagataaagaaattccagaagatataccgatttttaaagttaggtcagagaataatttaattgaggcaattgtaaaaattaattcaaatacatcaaaaagtgaagcaagaagacttatcgctcagggtggggtaaaactaaatggaagaaaagttatagattttaatgatattatcttaaaaagtaatgatgtaattcaaataggaaagaaaaaaattgtaaagctattagtagaataatttcataaaattatggtataattccatataataatttaattatattaaatcagaaataataggaaagtgcttaaatgcatggatgaattattaaatatatttaagcttaagtttttatgaggagatttatcacaaacaaaaaaggcttaaaaagcttccctacaaggttttggaatggatttctataaaagaggtaaaactagtttatagaaattgaaaaaggtcgtagcctcaaaatattatttttgtgaaatactttatggggtaggcagagttgctgaagagtagaataatattttaagataattggatattagtaagatagtcaacataagaaaggaagtataactaatgttaaatactttaagaaataattctaaaacagaaaaagatctattggagcaattaaaagaatgtcctgtatcagaaataacagggatagtatctataagtggagttactgctggaagagcaggtggcgagaacatatggaccttaaatacagaactagatgcatggagaattaatggtagtagtataaaaaccacaccacttcatattaagaaaaaagttacagatgaagaattaaaaagtatacagaaggtaataaaagcagaaaccatagtaagaataaaagcgcgtatgattgagaaaagtgtatttggtagacctgatgcgcttttagaaggatttattgaggaagtttcaaatgataaggaattaaatgaatacttaaaggaacttcaaaaaacagttacttatgttgatcctgattttggaagccttgtttttgatagaatggttaagtggtatggtggaaatataatttggggagaagatagaattaatcttaatttgctactagatgatgatgaaaatatagcctctagcttagaggtcgcaaaagacttgtggaataatcaattaatgtggcaaaagcgtgtttgtgattatgcggttgaaaagcttcttggtttaaagaatgaaagttggcttgaagaggatgaggaagaaataacagctgaagaatttaaaaagcgtatgaagcttgaagctattacggtaagaccaaatggagaatttgaattttggcatgatgatggagatttattttggggacactcaattttaatttcaggtgatttaaatcatggtttggaggatgcggatattccgggttagtggtttatagaatatttgtgtgacatagcttatcccttttgggagtttggagaccagaaaaaaagagagaaaaaataccctaattacatagtagaagaaatgaaaaaatttgaagatgagtatggaaaggtaaaccatgatctttatagtccgagcctaatttataaaaagattcaagattacaatgtatatagaaatgaagacaaattaacaagttataaaataatttacaaatacttgcggatgcttgatttaaagaaacttgtgtctacaattagagctgatagtcttgatacttatgaagatagaataaattttgggcttagcagtgatgtatgtggatgtatgcttttttgtgccacttatggaactatatatccaaacaataaattagaggttacacataattgttaggctttaaaacgagtgaaaatggaaagaagaaaataggtaaaataaaagtgaatagaaattaaataactttaaaggctacaactaaggtgtacttggatagataataaataagaaaggtgtttatatgctagcacctttctttaatttttactctttaggcatattttctaagaattttgttatatagctaagagtataaaaatctctatctatctgactattaagaagtgtaagccccttaatcaatgtttcttcgtcaaaattttctagaagaagcataagacttagagtatttattcctccatcctttgtatcgagaattcgtgatttttttatatatttattttccattgcacttaaaacagcattttttaagttatcactaatttcaagtttaggcatttcattaaagattcttatacctggattttttatatctaagtttttagctgcggctgtattggttgatacaaatatagtatttataaattttgcgtctttaaagctaacatcttcaagtcttactgagtcaaaaacagtattttcaaacactgcatctttaaaatcgcttccttttaaatttgagccaatgaattctgcatgcttaaagctgcatttataaaggttacagaacttaaagtgtgctcctctaaaatttacatagttgaaattagacattgaaaagtcgcagctgtagcaatggcttctttcaagattttgatacatgaagtttttgttctttttttctgcactattgtaattaaaattgcctttagcgttcatttttacctccagttaaatctcttctaggtatcttaaatttaatggcagcttctatatcttctaattttcttttatctctttcagcagcgaacaagcaagtgtagccttcttctccagctcttccagttctacctatacgatgtatgtagctttcaggattatctggaacatcataattatatatatgacttactccacttatatctagacctcttgatgctacatctgtagctagaaggtattgaaaatcaccatttctaaaggacttcataattctttcacgttttgtttgagttaaatcactgtgaagtttttgacagtcaaaacctcttctataaagctctacttcaagttcatctactcttcttttggttcttccaaatatgatagccataaagggattatcttgctttaatgcggtacacaaatcttctaatttttttctgtcagtggtttctactacaaattgttcaatgttttctaaagtaacctcttttttctttgtagatattgtaagagggttagtcatgtatctataggctaatttttttacagcagggcttatagttgcagagaaacaaagcatttgcctttttttaggagcatttttaaggatttcttctacatcatttttaaagcccattaaaagcatttgatctgcttcgtcaagtacaaaactttttaactttcttagatctacagtttttctctggataagatctaaaagtctacctggtgttgcaataataagatgagtgcttcctctaagttttttttgttgggaggctatatccttaccaccataggcagctaatatatttatatccttagcttctttaagctttaaagcttgttctgttatttggagggcaagctctcttgtaggtgttacaatcaaggcttgaactgcgcttaatgttggtgatatattttcaaaaatagggagtagaaatgcaagggtttttccggtacctgtttgggcttctccaatgacatctcttccacctttaatgtggcttatactctcagcttgaactggagttggctcagtaataccactcttttttagcacctcaactagtgcttcactaattcctaattttttaaaattcattgttttctacctttcgttatagggataaaaaaattttccctttagtactatgtattttatatggttagcatagttaataataccatactgacatacataagttaatagtttacctataatagtataagtcatataagttttttaatactatagtaaaaagaagattaagtgttttttataaaatgtgaacatagattcataaatttatgaacagctttacatagtctgaatattatatattgataaggactacattgagtccgtaaaaaaacgtaggggatgtaattatgaaatacgaaaatcagttttttgaagataaaagtattgtaaagaaagaagtagttagcattccagtttctcaagaagaatcagtaaagggaaggtattttgtaggacaaacaggaattttgggagtagataaaggcataggtgcttgggcaggtttgataaatccatgtgactcaaaaattgatttgtatgcttatgtatttaccattacaaacttgtctagtgagtatttaattgctgaggtatggcttaatacaaatcttcctcaaaagggaaggatatcacacagagtatcacctacaaatacttctttaagacctcttcccaaaaacaaggtggatattagatttactgattttactagtgaattgccatgtgaaggagttaatgtttatgagaggattgtaccgcctaaaacaactttagtagctgaagaagatggaaaatttatagagggacctaatggaaattatgtaatagtcataaaatctttaggagcaagtcttagtaaggcaatagttgcatttggttggtcagaaaagccaatatattaggggaataataaaagagagctgcatatgtttttagttttgcagctcttatttaatagaaattatttttttattaccttagcattaccgaaggtttctattttaggattttctttttttaaggtttcttcaatgtgtcttacatcttctatttgatttttatatattgatacatcctctaaaattatcctatgttttgaaaagttaacttcctcctcacttagaggtattcgtataacttcttttttatcatcagaagccgtaggtattttttctattacgagttcttcacgttcaacaggtatagtaaaagttttttgtatggaggaagtttccttgtaggctttaacatcctctgtttgtatccactgtttggctatgtctaattgttccgacttaagctttagggttacattttcagttgaggaattcaacaaaaacacctcctatttaatttaaaaaacacctcgcgagaatatcatcggaggtgtttttattatattactgctgcttaggctgagtatcaactacatcagcatcgcctgttctgtttactctggcttcttctcttttaagagtttcatctacatgatgagtgtcttctacatcatgtttatgggctgaaacttcactagttagtactgtatgcttaccaacattaactttttcctcgctgacaggaattttaatactttcctcgtcagttataggtgaatcgcttgcttcattgtttagagcttttctttcaattactacttcttcacgttttacagggacatcaacggctttatgctcttctataatttccttgccaagttctacttcacctttttgaactttatccttgttgatatcaagttcttctttacgaagtttaagtttggcatcgttatttgtatctgcttttttattatcatcgttttctccaaaaagtccatctaatattcccatgtgcaagcacctccatataataatttttgcccacttatatattaccctataagaaatatattatcctgttttaaatatggaaagaaaagaaataagtgtacagagtataatataaaacttaagtgtaaaatattgtaaaaaataatttaatgaataatgcgcacaatcaccatatattaaaatttattctgttaaaaaaattaactctttggttgatgtatttgtgttggataaaatttctttaaagctttatagctcaacatcattatagttttaatattaggatatctatatgaaattttataataaataagagaaattattatttctttaaaagtaaatatataaaataaggagcacctattaccgaaactactattcctgctggtatatttccagactgaagtaagtgctgtccaatagtatctgctaataataaaagccatccgcccattaaaattgctattggtataaacatctgatttctatgtccaactaatgcctttgctatatgtggagccatgagtcctataaatgatatgtttccagtaaccgaaacggcaaaagaagataatgcaactgaagccataagtagtttaaatctttctttttcaattgacatgcctacgcctatagatacatctctacttaatttaataatatttaaggtattagatttgtacaatatatatggcactaatataactatacatggaaatatagccaagacaaaagcccaatccaatccccagacatttccagctaaccacttagatataaaatctacttttgatctatctgcaagagacataataactatcataagtccagatagcgccattgaaagacctacacctagtagaactagcctcaatggctgaacaccctcattttttttgtaggcaagcagatatataataactgcagtgattagtgcgcctataaaggctattattggaactaaataagaaaaagtttttgaatcaattggcatatacataaaaaatactgttacagcaacacctgctccagagtttattccaattataccgggatcggccaaatcatttcttgttatattctgaaggactgcgccagatagggcaagagccataccggataatattgttattgccattcgtggaaatctcaaatcaaataaaacaaactcatctttaaatgagccttgtcctaataaagtaggaatcaaattgttatatgaaagagcatagtcacctatacctaaactaatgactatggttaaaactgtaagaagtattataataagtagtactagtctatgtttcatttctctttttttctctataatcaactgttttttccccccttatgaactatgaataaaaagaatggtaaaccaattatagatattattgctgctactggcgtttcatagggagaagcaactagccttcctaaaatatctgaaaaaaccattagtgcggcaccaagtacagttgaaattggaattacaaatctataatcttttccaataatgaaataagctatatgtggcaccattaaacctaagaaaactagattagatgcaagggctaccgaagctccagcaagaattgttaccacaacgaaaaggattgcctttattggtgttgttttttgaccaagtccaacagcaacttcttcactcaaagataatacagtcaattgtctcgataaaataaatgctgtagcaagtcctaaagttataaatggtataataacagcaagttcatcccaagatgttcctattaaaccacctgatgtccacattgatacatcttttgatagtttaaagtatatttgcataccttgagaaattgcaaaaagaaaagtcgaaactgctgatccagccaacacaattctaagaggagaagatccacctcgttttgaaaaacttattccaaaaaccagaactacggcggcagctgctcctaaaaagcatgaaattaaaatagttaaatagtttgcagaaggtgctatagttatagtaattgtcagtgcagcatttgctcctgcagtaagtccaaggagtcctgggtctgctaaaggatttttacttacaccttgcattatagctccagaaactgctaaagctgctccaacaaatactgcggcaatttctctcggtagtctaatttcccttattatatttatatttccgttttttacactgctacttactgcaagccacacatcatttaatgataccttctctgctccaagtattaatgaaagaataaacataataataagtattataactgataaaattaatttactgctaaagttagttatactattggttttgtccaatcaaacttcatctcctttaaataaaaattaaagaaggagaattctgtttgtgaattctccgatagagcattaaaaatctaaattatttactatttcctaaaaaataattaataaatgtgtctaactcatagtccaatgagattggatcattaaagtaaaatttatttgcgtcaacttcaagaactctattgtttttaactgccggaatatttttatatgtatcagtattttgaaatgaattgtctgctgctgaatctttgatgtaaattaaataatctcctatatattgagggagaacttcggatgaaataacataatatcctggttttaaggcgttagcggtcactttagcaggcatttttagacccatagcttgataaagtatctcacttcctcttccccaattgcttccaaaaacatataactgtttgttatctccacctaaaattgttactgttgagttattgcctattttatttttgattttttcgccagcatcagaggctctctttttaaaattatttacccattcctgtgcttgtttctttttatttattaattttccaatttcaataacttgatccaaataaccaagtttattgtaggtataagaaacggtaggggctattttagatagtttgtctaggtttttatcagttgaacctgctattattaaatcaggttttaattcaattattttctctaagtcttcatcagatactacagtagcattttttaaatattttttatacaaaggatttgccattgagtacttttcaacaccaactatatttccgcctagcttcatgatatctccagaggtgcttccgtttagtgcgactattctttttggatgtgctggtacctttattggaccattttctgatttgtatgtaattgtttcagcttctttacttgtatctttagaagttttgatactattttgactgcaagcacttccaaatatcatcattattatcattattgaaattaatatttttttcaattacttcatctccttgattaagttgtatgtaaaacatattggtttagtggttctaggatcgattccaatttcagcgtcgatattaaacactttcataagtacttttttagttattacctcttcacattttcctgcttttactatagttccatttttaagggcaattatgtaatcagcgaatctagctgcttgatttaagtcatgtaataccattacaaccgttctatgttgttctttattaagtttttgcagaagttctaatacctctagttgatgtgccatatctaaataagttgtaggttcatcaagaaaaataatatctgtttcttgagctaatgccatggctatccaagccctctgacgttgtcctcctgaaagtgcatctagttgtctgaacttgtaattcttagttccagttacctccagtgcccagtcaataacttcataatctttttttgaaagcctcccaaaacctttttgatagggataacgtccataggaaacaagttcggctacagttattccatctgtactctcaggggtttgtggtagaatggctattttcttagctaaggtttttgtattttcttttaaaatattttttccatccaaaagaattgttccagttttagttggaattatacgagttaacgccttaagtaaagtggattttccacaaccattagcacctataattgtagttatttttttatctggaatttttatactaagatttttaacaatcaaattattgtcataagcgacgttaagcatgtcagtatataacctagtcattttttcctccaatactaaatgatttttatatgtaactgataatgtttatcaatgattgttaattatactttgtttacactaaaatgtcaataatcatttttaattgaaaatgaaattcaagttaggcatataatcaaaagaaaattagtataaagtgagaattatggttaatctataataaattgaaaataatcttctaagaatattgaaaaaaactattttgtaatataatatataaataaattactaaaaagttataaaatgtaatgaattgtttgtagagagtattaatttgtttggagggattttgatgaaagatttaggatattacaatggagaatacgacttaattgaaaatatgaaaataccaatgaatgatcgtgtatgctattttggtgatggtgtttatgatgctacttatagtagaaaccataatatatttgcactagatgagcatattgaccgattttataatagtgccgagcttttaagaattaaaattccatatacaaagaaggaaatgaaagagcttttaaaggatatggttaaaaaggttgatagcggagaacaatttgtatattggcaggttactagaggtactggcatgcgtaatcatgcttttttgagtgaggatgttaaggctaatatttggattgttttaaagccactaaaggtaaaagatatgtcaaaaaaattaaaactaataacattagaggatactagatttttacattgtaacataaaaaccttaaatttgcttcctagtgtaattgcagcacaaaaaactgaagaagcaggctgccaggaagcagtatttcatagaggagatagagttactgaatgtgctcatagtaatgtttcaattataaaggatgagattttaaaaactgcgccaacagataatcttattttgccgggaatagcaagggcgcatcttataaaaatgtgcaaaaaatttgagatacctgtagatgaaactccatttacattaaaggagttaattaatgcggatgaagttatagttacaagttcagggcaattttgtatgactgcttgtgagatagatggaagacctgtaggcggaaaagcgccagatattattaaaaagcttcagactgccttacttaatgaatttttggaagaaacaaattaaagtttaaaaatccataactacacaatttatgattagagtactttaaatttagtactctttttctatgtaaaaaacataatgaacttagaataataaattagcatagcatattatagtaaataactagttaatgtgaaattttatttttcaggagatggttttatgagtgaggcagaaagtgtagtaattaaaggaggtaataaggataaaattttacctttagaagctgaagaaaaaaagcccattaaagaagagaagaataaagctgtaatattaagtaattggattataaagtatgcacctatagtttattttcatccagatgaaaaatgttttccaataacagtagaagaatttttagaatgtactgacgtcatgaatgaaaaaaatgaaaaattttgtgatggaaaagaaatcctctctggttcttttaaagatgcgttaggaaatcaaaaattttatcttaagattacagatacaagtgtaagagaaggaaatcttaatagtgcaaaatgttatgtatatgtcagaaaaagaaacaagggaagatatttagatttacaatactttttcttttacggctacaatggtccaacaattaatattcatcttaataaaaataaaaagaattattctacatccaatataggtgaaaattatggtaattgggagcatgttactgttgttatagattcaactgatgggtcaattctaggtgctatttttgatcaacatggtaaaagctgtttttatgatattgatcaattggaatatgaaaaaggacatattgttgtatattcagcattaagtagccatgcttcatatccatcagcaggtaaaagtgtaactgaatatgattcacaggagttaggagtgccgccggtttcagttggtatagttaaatttgaattacacgatgctactgataaaggaagaaggtgggatacatcacttgtgtgtcagcttgtttcttataatattactggcacggaggttgaagagcctaagtggatggcattcaatggacgatggggaaagccttacgatttaacagacaaagatataagtattttatatcaaatatcaagattgccggctggtggaaaagtggttgatagcttactatggagatttattccttacagtaaaaaaaatataaatcaagctaatggaattaaaagtaaagatgattttaatattattatttaactatgtataaccttacaataacggtatacccatttatacatataagtatttataaatgggtaaattagacttttagtaaggaaagaatcccatctatttttttgaaacttcatatttaattatactttttaatgcttcatctaaagagtaatgaggagtataacctagtttttttagcttgctaatgtctggaacacgctggagtgtttcctcaaaatttttatcgaaggctttttcatatggaactaagttgatattagaatttgattgtgtcaaaactttaatttttttggctaaatctaaaattcttatttcttcagtgcctccaatattgtagatttcaccaatttctccgtagtttaaaacaagctgtaaaccgtttaaaatatcctctatataaccaaatgtacgagtttgctgaccattaccatatacttgtataggcttttcttcaagagcaacatttatgaatgtaggaacaaccataccgtagtttcccacttgataaggtccaataacgttaaagaaacgtcctattttaactttaacacctaattccctatgataagcaagaaccaaatgctcttcggttaatttgccaacagagtaaagccaacttggttttttgcttgtacccaaaacggaatcatcttcttcatctacagatttcttacttatctttccgtaaatagcggaagaagaggaaataaaaattcccttattgtatagatgtgcagcttctagcatattatctgttcctgtgcagctaaccttaaggccttctattccctttaacattgctagtcttactccaactacagctgctagatgtattatataatcacatttattaactaaagagaaaactaagtttctatctaaaacactgcctttaattacggttgctttggtattattgagtctatcaggtaaagttgctgaaaaattatcaagtacagtaaccttgtgaccagcatttaatagtctgagagttagattagtgccaataaatcctgcaccacctgtaattaaataatgcatggtaaatcaccttatcatatatatatttattgctaaatacaaatttaattctatttagcatatattaaattatatgaaatttgaacacatatggtgcaaagtgcctataatttggtaggggtgatgtaatggaaaatgataaaataaaatcacaggaggcttttacgaaagaggaaaatgctagtgaaattactgtttttataccttcatttaatccaggtagatttttgagaaccgctttaaaaagcgtatattggcaaacatatagaaattggaaactaattttagtagatgattgctcaacagataatagtttggatatggctaaagatttattggaggatactaggattacagtaattaaaaatactagaaatttaggacaatctgaagctcaaaatagggctttggaattgattacaacaccttattgtgtacaattagatagtgacgattggttttttccaaatgctttagaaagattacttaagacatttagaaaacagccagaggaggtggcggttgttagtggaaatgttttaattacaagcaatgagataacgtggttcaaattaaataatggttttttggaacctaatattagaaaaggtcgtttttttaaagataagtatgattttttattatcaaatttgactctttggccacgatgctatagaacaagttccttaaaaaaaattggtggttggcctacagatgacccatatggaggtcgtcatatggaagacagaagagtgcttttacgattagtagaaaaaaatcgtttttattggattgacagcgtgctttatgtttatagacgacacgattataataatacaaataaacttgatgtctataatcgcatgattgagtgggaaactaggagagtattaaaacgttggggagataaattcaaaccaatctttaaaatggataagagtgggtggagatatattgatcactttgttcagaagcgaagatgatttgtataaaatttatgaatgtgtttatagtgaagagttcttgcattaaaactggtgaattgatgtaggaacttttttatgggctaattatctttaatattgtaatgaaatgcttaaagaaggagattaagcattttattaggaaaaaatgtatttaatgttataactataaaatatacttgtaaaaagtttaataacattataaaataataaaaaactgtaaaagtcaaatgacagtaaatgaaaaaaatatatattgaattttatacaagtattgatttatataggttcagctttatttgtagaatttagtttatgctataacttgacaagaatcgagaaatgtattagtataaacaaattgtggatttataatgttttttaaggaaaaatttacattttaatgtcattgttacaatattattgaaaggaggctatgtgtgaaagttattgtagatatgtatattacattatttcctgtaatattagcgggaatatttaatatgatttttgttaaactgccagtacttaatgtgttgaaatatccaatagacaacaacaaaacattaaaagatggaaaaagaatatttggagataacaaaacctggaagggatttttaggaatggtggtgtttgctgctatttctactgtgatttggggagtgatttgcagcttaaataaagcaatatatcaaaataatttatcatatagctatcataaaaatatatttacatttaatattatccttggattagctcttggacttgcttacgctctgtgtgagctacctaatagtttttttaagagaagggtaggaattgaaccaggaaaatcaattaataaaaaaaatggttatgtgtttataataattgatcaagtggattcgctatttggttgtgctttcgtaattagcttggttagttctatgacattaccttactatcttatttgtgtatttttaggtggagttacacattacatacttaatgttttattatatttattaaagttaaagaaaaatatttaggagatgaaagagcatgatttttgatattgctaaaggtgaggtatctcaagagctgggtaataaagctaagtctttaatagaaatgagaaaagagggatttagagttccagatgggtttgttattgacagtaatacatataaagaaatcatttcctacaatgaaaaagaagaagatataaaaaatatattatctactataaataaatctaacatagatgttttaagcataaaactagctagtatttttgatgactttgtaattatggatagtttagtcaatgaaatagataagagattaaaaaagggagtaaaatacgctgttagaagtagtggattaaaagaagatttagataatttatcttttgcaggacagtattcaacctttttaaatataggtggtattgaggaaataaagaaagctattattgattgctataaatcaatgtatacaaaaggcgttttatcttattttattgataataatttagaggtaagagaacttgaaatggctgttatagttcaagaaatggttcaatcagagaaaagtggagtagcttttacggtaaatcccataacaggaatagataaagaaatggttgttgaggtaacagaaggtttgggagaagctatagtaagtgggcaagtagttcctgaaagatatatttataattggtttgaggataagtacgagtacagtgaaacaaatagccttttaagtaaagaagaactagagaaaataatgaacacagctttaaatattcaaatgcattttgggtatccttcagatattgaatttgcaatagaaaaggacaagctatacattttacaggtaagggcaattacaaaaattaagtactcaaaaataaaggatgaatggactactgctaattttaaagacagtggagtttcagcatctgtttgtactccggctatgtggagtttatatgagtatatttgggaaactgttctaaagaaatttatacttcaatcaaatattttaaaggaaaaagaattaaataaattgggagatatgttttatggtcgtccatattggaatatgagtgttgttaaaaaagcaatgggaaaaattccaggatataaggaaatagactttgataatgaatttggggtgaaaataacttataaaggagaaggaaacacaactaaattaactcctgcatctattataaaggtaattagaatagcgtttgctcaaagaaagatagtaaagaatcataataaaaatcttgaagcatataaaaatgaaatcctaggcaaatactctaaatacatagaggattatgaaactgaatattcacttaaggaatttgaaactatctggtatgacttaattaaagatgattacctaaccagtcaaggaacttacttttggcaaatattcataaataccattcatcaaacaatttttaagaataaaattttgaagtatttagataaaagtcagtatttagatttaattggtggattaaatgaagtttcacatcttcgccctttttacgatatgtgggatattacaagaaacataattaaagatgaaaatagctttagcttttggaatagctcaacagtagaagagataaaagatgaatattataaaaataccgagaaatattttatgattgattttaagaaatatgtgaataattatgggcatcattctaaaaaggaattagatgttacgtatccttgttacttcgaagatgtagatactcttataaaaatgtttaaagatactattttgcttgatgacagttatagtccaagaaatgataaaaaaaggcaaattgaaagatacactaggcaaattgaaaatataaaagagaaggtttctgataaaaaatatcgtataataataaaagaagttgaaaaaatgagagaaatgctgtggtggcgtgaagaatttagagatatgaccacaaaattttattacataatacgaatatataccttaaaattagcaaaactatataaagcctatgacataatagaagatgaagatgatatatggtatctaaagatctttgatatatgggattttatcgatggaagaaaaacaaaacaagagataaaggctatagtattaagaaatagaaaatactatcaatcatttagaaactttgagaatgaaaacgaaataggtactaagtttgaaggtataaatgaaagcaagaaagtagcttcaaataaggtaataggagttggttgtaataacggtattgttacaggaacggctagagtaatagaagacttggaggaaattgaaaccttaaaggttggagatatattgataactaagtttacagatacaggatggacaagtaaatttgcaatgctaaaaggaattgtaacagagtatggtggtttattatgtcatgctgcaattgtttcaagagagtatggtatgccatgtattgtgtgtgctcataatgcaacaaagctaattaaagatggcagtagaatttcaattaatgggacaacaggagaaattacactgcttgaaggaggaatttaacatgttcataggaatatataacagatcagtaatcgtaacatatatgggaatagcatcagcaatggtaggtatgtacttagctgataagcacgatattagatatgcaatactatgtttagttatagcaggagtatgtgacctttttgatggaaagattgctagaatgtgcaagagaacagaagatgaaaagttgttcggaatacagcttgattctctagcagacgttatatgcttttcagctctgccaatttcaatattttatggtctaggattaaataagtggtatcatgtagtaatttatactgcatttactttagctgcgattacacgtttaggtttctttaatataaaagttatggattcaaatagagataaaccagttgattattatagtggattacctgtaacctgttcggcaatgatctttccgttgttttggcttctatccttttgtctagatagacatatttttttacttatatatacaattattattgcagtagttgcatttctatttgtagctaatattaaaataaaaaagcctaagggaattgcatatggtgtatttgttgttttagcagtgcttatgtcacttggaataatattcataggtgtataaaatgagtataacaatatttaatagagatttaaaagaaatctattatgaaaagcaatataaaaatggacaacttaaatttttatacaatactattttaggacgaatgcttttaaaattatttatttcaacaagattgttttcaaaaataaatgctatttttaataataataagggctcaattaaaaaaattgaaccctttattaatgaatataaaattgatatgagtgaatatgaaaaaaaagaatatacctcttttgatgatttttttacaagaaaaattcttgagggtaaaagaagtttttctaaagaaaaaagtcacttgatatcaccagcagactctaaacttatggtatatgaaatagatgatgatttaaaaatgaatattaaaaatagtatatatactgtaggagagttgttaaatgacgaaaagctttcaagagaatataagaatggaacttgcctaatatttaggttaacagtggacgattaccacagatactgttttatagatgatggaagtttaaagtatagaaaagttataaatggaagattgcatactgtaggacctatatcatctaaaagatataaggtttatagtgaaaataatagagaatattcagtcttgaaaacaagaaactttggtaaagtaattcaaattgaggttggtgctcttttggttggaaaaataaaaaatcattcaattaaagtctttaaaaaaggtgatgagaaaggttatttttgttttgggggatcaacaatagtgctgctttttaaagaaaaggttattaaaatggacgaggatattttggagtattctaaagcaggaattgaaacaaagataaaaatgggagaaaagataggagaaacaaatgattaaaaggttaaatgtttatttaaaagaaatgtatccactactgccgagattgattttaagtttaactttgttttttgaaatatatatgattacattgttaagtaatcatatttcatcttttagaattggcattcaagaatttgttggtgtatttacagtgtttggcttttggttagctttaagaatagcagatgaattaaaggattatgaaacagataaaattaattttcccaaaagaccgttgccatctggaagagttaccaaaagagatttgtggattttacttacaatagattatgctttaatgatatttttgaatttggtatttatgaataatgtgttattttttatagtgctgcttatctatggagttttaatgtcactatggttttttgctaaaaaatatatccaacctaatttggtgctggcgcttattactcataatccagttgaattaattttagattactatataatctcatttgcctgcattaaatataagctacctgtgtttacaggaactacacttttaatatgcgtaaccttatactttcctgcattagcctgggaggttagtagaaaaataaaggctccagatgatgaaaatcaatatgtgacctattcaaaattatttggatataaaaaagcaaccatgtttgtaatgcttgtaatattttgcgaaatgataactacaaatatattagcttatagactttcaattataatggttattattttaacagtaagatatttttggcttgtttacaattgtatagagtttataaaaagccctaaaaagtttaagcttggaaaaagagtagaggtgtacttatatattactgcacttttagttttgataatggaaatcttaaatcttttcgttatgtgaggatggtatttatgaataaatatatcatggatagtggagatgaagaaatcttaaaagagggttctaaggcatataatttagccaaaatgaaaaatagtagcataaatgtgcctgactttttttgtataacacatgaatgcatggagtatcatttaaaagatagtgcagatttaatagagaaaattattaaaaatgtagactttaaggatgggaagtcaatagaagctgtaagccaaagcataaaagaaatttttaggattgtagaattagatgaaaaaataaaagaagaaatagatatatacttagagaagaatttcaaggaagtaagtttattttcagtgagatcatcctcattggtagaagattcaaaagaattttcctttgcagggcaatttgatacctaccttaatgtatcaagagaagatttatttcaaaacattgttaagtgttggagttctttgtattctcaaaatgttttgaaatataattatcataaaagcatttctttttcttctttaaaaatgagtgtaataattcaagaaatgatagatgcagatttatctggtgtagtatttacagctaatccacaaggtattttaaatgaaatggttctagtgtgtggaaaaggaacaggaaaccaggttgtagaggataaggttgaaactactacttactattataatattacagataatttatattactatgaaaatcagctgaaatctcctatcttaaaggagagtatttttgagagtattataaaagtgtcggacaaactaacaagtatatttgaaaaatatatagatatagaattttctataaaacatgataaattatatatacttcaggttagacctataactacacttggagataaagatgttacaatacttgataatagcaatattgttgaaagctatcctaatataacacttccacttacagattcctttgttagtgaggcttattatagggtgttcaaggcactagccatgagatgttttccgaaaagagcattagttgaaaagtatgatactgttttaagagaaatggtgcatagtgcaaatggcagaatgtattataagataagtaattggtatacggttttgaagtttttgccatttaggaagaaaataatacctatatggcaggaaatgatgggagtaaataataaagaacatgaaaaaaaaggcaatgatattacatttcttcaaaagattaaaatatatttaaatgccatacatgaagctttcaatgttacaaaagagatggatagattaaatttaaattttctacaagtaaaaaggtactttaatgaagagtataaagaggatttaagtaatgaagaattagttgatttgtatgatagtgtagctaaaattttattaaaaaattgggatataaccttattaaatgatatatatgcatttgtatttactggtttattaaaggctgaactagaaaaactaaagcttaagaatcttgagtttgaaactaataagtatatttcaggaattagcaatattgaaagcctaaaaccaattaaaagtttgattgaactttcaatatatgtatctagtgatgataaattaattggagagttaagtgaattaaacagcaatgatatggtttgtaaatatttaaaaaacacttcttctgattttgtagaaaaatttgaaggatacatagatgcgtatggagatcgagctttagaggaattgaaattagaaagcaaaacttttaggacttcgcctatacttttggttgataaaattttggaatatacaagggataaggataggttagaagatagatatcaaacgttatgtaataaatctgaaagttttatatcgaaagaaatgtttgataaatgcggttttgtggataaaaaactgattaagctatttagttcaaaggctcttattggaataaaaaacagagaaagctcgagattaaacaggagcagagtttatggaatggttagaagtatatttctagctataggaaacaatctttttaaggacagaaaaatagatcatatagaggatattttttacctgtatacggatgaagtatttgaatatataaaaggcaaagagtatgattttaaaaagcttgtagagtatagaaaaaaagaatataaaatgtatgaagaattaccagcttactctaggttgattttttctgaggagatatttaataaaaatcacttaaatataaattctacaccaataagagaagacaaaagtggtataggtggaattccgtgctctaatggagtggtggagggagaaataattgttatagaaaaccctaagatgtctagagatgtaaaagataaaataattgttactaaaatgacagatcccggatgggtatttttacttacgctagcgaagggaataataacggagaagggctcactgctttcgcacacagctattatttcccgggaattaaatataccagcaattgtaggcgttaataaggtgactagtatttttaaaagtggcgatatgataagaatggacggaagtactggaaaaattgagagagtgagtgatgaagcgtgtaccaaataattaactttgatagagaagaaaaatatataaaggattttttaaagcttccgaggcttctttattcaaaaaaagagatagctcaaaatgaaagtgaagaaaaggaacttttattaggaaaacacttgctctcaaagtattttaagcttaataagtttcttgtatataaggattcaaaagtagcagcaagatgtgttattacaacatacccaaatgactcgaatgcatatattggcttttttgagtgtatatatgatgaagaatgtgctaaaacactttttcaagcagtaaaagagttttgtaaaagaggcaactacaaaaaaataattggacctgttgatgcaagcttttggctaaagtatagaatgaaaataaataaatttgaagacaggccatatgtatcagaaccttataataaaaaatattatttggatttatttttgaaaaatgactacagtataagtgaaacgtatatatctaatatttataaaaagcttccacgtaattttgaaaaggaaaaaatcaggagaaggtatgaggagtttataaaaaagggctacaagatagtaagccctaaaaaaatggattacaataaagctatatgtgaaatatataagatgataatagagttatatagtgatttccctatatttaaatatcttaatgaagaagattttttaaaaatttttgggaattataaatatattttagatttttctatggtaaagttagtttattttaaaggagaaactgtggcattttttataggtatgccagactataaaaatttgctatatagaaaatttaatttgtttacaataataaatgtgcttttaaagaaaataagaagcaaaaactatgttatgttgtacatgggggttaaaaaagagcatgttggtttaggaaatgcaatgactcaaactataataaataatctccaaaaaagaaggtccacagcaattggggcatttataaaagaggggaaagtaacagaaagctacggaaaagatacaattgaaggaaaatataaatatgttcttttagaaagtagtttacaaaaacattaaatgtataaaaagtacgtgaaaattaaaaatagtataggaataacatttaatgtgggaggcaaatatgaaaatagaagctttttttagaggaataaagaatgcaaatgaggcagcaagtaaacttaaaagtgaaggtatcgaagcttttacagatataaatgatcactatcaaacaggaagtagtgtaaggcatccaggatttattcctacatcaagtaattctgatttagtagtgaattcaggtttgagaggaggagaagcagatagttctcctcttagagcagcgagtccaatggtaagtggcatgggaggatttaaagaaataacaaatgtaaattacaaggttatagtaaatactgatgaaaacaatgagaaaaaggcgcaggatataattagttcacttggtggttctatggaaagtcctaactttgatggtagtaagcatataaaagatgtggatttttcaaaggcagatccaaactttatgaaaaatcttcaataggaaatagcagggtatgataaaatttattttttattgtaacctgctatttttatatacatttttacgagcatatactttcatttaaataaaataatcatttttgctttaaaatatcattaataaatagtgaaaaaagtatagtaagatgcatacaaagataaaagatatttgtaaaaaaacaactaatttatttacattataattatatattgacaatatttatattttttgtaataatgtaattgttaacgttaaacaaagctgcgtaaccaagaaaattaacattagtaaggaagaatatgtttatcgtaaacaaaaagatatgaaaaggggataaaaaatgggaagaagattttcaaagagattattggtggctattttagcatcatcaatggcaataagtgcaacttttagcgctaatgcttcaactaaatatggaaaaaattatgtgtcatcagtaactaaggcggtagagacatcagcagtatctatattagagagtgaaggttctttagaatctgctaatgttgaatggagtccagttcaaggcgctgcatcatataatgtttattacaaggcagcagatgcactagactctagttatacaaaaattgatgatgaactgattagacaatatccgtcatcatttagagcagatgtattaggtttagctgctggaaattatgtattaaagatagttcctgttgtaaatggtgtggatgctattaatgaagaagcaactacacaagccctaacagtaaaagcaaataaaagagaagggtttgcattttcgcctgcatcaccaatgaagacaagctcaggtggatataatgatgatggtacagtagcaagtaatgctgagatattatatattacagctagtaatgtaaacactgtaactgaaaatgttgtaacaaatgcaaaaggaactaaaactacttgtacaggtcttgtaaatattttagctggacgtcaaaaaggctatgataaaagtccacttattattcgtatgataggcgaaattaaggcatccgatattacaggacttaatgagcacacatatatacagttaaaaggttgttataatgttacttttgaaggtgtaggtaaggatgctacagcttatggttggggatttttaattcgtgatgctcgtaatttagaacttagaaatgtaggaatcatgatgtttggtgatgatgcaatatcacttgacacagataatcagaatatttgggttcataataatgaccttttctatggtgctgcaggacatgatgcagaccaagttaaaggtgatggatcttgcgatataaaacaagactcaacctttgtttcagtttcttacaaccacttccatgattctggtaaatcatcactttgtggtatgcaggatacacaaaattactatgtgacatatcaccataactggtttgatcattctgattcgagacatcctcgtataagggttggatcagttcatgtttataataactattttgatggaaatgcaaaatatggagttggtgttacaaagggagcttcagcatttgtagaagctaattactttagagattgcaagtacccaatgttaagctcacttcagggtactgatatattttatgacagcaaaggagatttttcaggagaagacggtggtatgataaaagcatacaacaataaaatagagggggctacaagacttgtttatgcaaatcaggatcctattcaatttgatgcgtatttagcttcatcaagaaatgaagttgttccaagcacatataaaaccttagttggaggaactacttataataactttgatacaagttcagtaatgtataagtatcaaccagattcaccagacgatgttaaggaaagtgttactagttatgcaggaagagttgatggtggagatttaatattcaactttactgatgcagatgatacaagtagtgtgataaatccagatttaatggctaaagttaaaaattatagttctactttagtatcagatggaagtaaagttgtaaaataaaattaaaatacaggtaaagagctgtcctatagttgtttttttattaactataggcggcttttttttattgtaatttacgcttatttatcaactattttgtttaataaaatcgtaattttgtggtaaatataaaacaattaaaaaagattcaactttgttacaagttaaggcgctttataatgattataacttcaacattaataaagattagtcgaaaaaaatcgataaataataaatactattataaatcgattgaagaggtgttttaaatgaatgaaaagtcaggagtgaattttagaagtataagagtcaaactggtggcaatattgctattattatgtttaataccaattatgatttctggagtttataattattataaggctagtgaacttttatcaaatcaatttcaatcctcaactttggaaactttaaaagcagttagtaactctatggataactatttttctgtatttgaatcagaaataaatttaatggctgaaaatcctatgctgaaaaatatggataatgatcccaggggagcacaaggagcatatgatttatttgaaagtgtaatgaaaagtagaaatgatattttgaaagtttacataggggagccaaataaaaattttgtaaattgcccaaagactaagatgccagatagttttgatcctacaatgagaccatggtataaaaatgctcttaataaaacaggagagatagtttatacaggtccatataaagctgctagtacgggaaagatggtaatttcattgtcaaagactattgaaaataacggcaaagttgttggagtagtatcaatggatttaagtttggatgaattatcaaaaaaactatctaacacaaagattggacaatctggatatatatttgtaactgattcaaatggagttatgatttctcatccggataaaagtcttcttggaaataattctacagtgactgctctaagttactggaaggatgtaaaaaaaacatctagtggttttgaaacctacagttataagggcaaacaaaaatacatagtttataatacagataatagaacaggatggaagatgatggcatccatgcctacaagtgagttaacatctaaaacaaagtccattcaaagtgctggtataactatatttgttttaattgcagttattggaacagttatagcaatttttgtaagtagaagtataacttcgaaaattataatattaaaggaaatttttaaaaaagcttctcaaggagatttgacagctgaggttaatataaggacaaaagatgaatttgaggaattaggaaatagttttaatgttatgacaacaaaaataggtgaattaatattgagcttaacctcttcctcacaagtaatatctaaaacttctggtgatgtaaataggatggctttagaaacgaataatgctgtaaatgaggtagcaacaagcatagatcaagttgctcaaggagcatctgaaacggctcatgatatacaatctagtgtggaagctattaataatcttgctgaaaaaatagatgagatagataaattgacaaatgatatgattagtacatctgataagtcaaataaattgagtaatgaaggcttagaggttatgcattctcttacagataaaacagaaaagaatatagaggcatctaaaggtgtaacttcggttgtttcggcaatgaaagaggaaactgataaaatatcaatgattacagatacgattaatgaaatagctgatcaaaccaatctattagcattgaatgcggcaattgaggcagctagggctggagaggctggaaaaggcttttctgtagttgcagatgaaattcgaaaacttgcagaacagtctacttctgcaactaatgagattcaagaattgatttcaggaattaaggataaaacagatagtgcagtaaggtcaatggagctatctaatataattgtaggtgagcaaagtgaggtagttaatgatacaaaagagatatttaataaaatacttaagtgtattaatgaaattattgatcaaataaaattggttcagtcagcaacaattgaaactaacagggaaaagactcagttaatcggaagaatgcacaacatatcagcagtttcagaacagtcatctgcaagtgcagaggaggtatcagctacagctgaagaagtaacagcagtaatgagtgaatttacaacttcagcaggagaattaaataatctttcttcagaattagaaaagcaaattaaaaaatttaaaatataagtaaagtaaaaaccgtattgagtttatgcaatacggttttttatctaatttttgtatggaatattttttagatttatggaagtaatagtttttgagtgtgtgtcaaagtaaatgcgaagctcttgaccataatttcctatatctgtattgtaataaattatccaaccagcttgtttcatatagtcagtttttggagcaccatacgctttgatgacgtcattatatgttgagttaagggtgattccttttggcagcactactgtgtttttatatgaagaacttgttttagctacaacgatagccccaagcattgcatcatcaaatttaacagtagctccacttgtattgaaaagtgttacatcaattttgctttcttcacttttactgccatcatccatatgtattgattgtacgtaatatccatcctttaatggttgtcctttatctgcgtaatcattaaatttaaaaccatcatctactagttgttttgctttcataggtagagagtacttttttccattcagagttatgtcgccacttagaggatcggatttcatttgcgaagtgtatttttttatgtcttcagttgtaagtttttttatcttagtagaattagtacaggctggtaacataattaagaatagacttaaacatatgatagttatttttttcatagttatttcctttcctttgttaaaatatagtgttatttaagtgagttttattatatcataatacaaaaacatataaaatgttttaatcatattgcatatgtaaggcgattataaattttaaattattaaatacacagtatattataggatttattgtatatatttaattattaaaaaatttatcaaaatatatttataaaaaaaaatttattgaagaatataataatgaaaggaggaaatatatatgagtaaaaagctaactagaacaaaacttaaaatggctgcaatagaaaaaaacatgatggaagtaggagctgaattatatagtaatcttgaagtaagagatgaaattaaaaagaagcttaaaaataaaaaagttaagacataaagtatagattagcttaatatatattaaaaaatttataataatatcgaaaataagttaaggtttatttgtcaactttataataaaatactgtaaatatatattcttatgtcaatattataaggcgaaattaagtaataagtattttataacaacatatatttggaatataaataatataaaaaagttgatttatttatgaaactgtggtaatcttaatcaagacttaaatttaatagtaaataatgcagcacaatatatttcaattagcacttagtaagatttggtagttaaggaattttattggtgaggtattacaatgagtttaagatcaataaaattttggaggtatacagtatatgactggtacagttaaatggtttaatggagaaaaaggttttggatttattacaggagaagatggaaacgatgttttcgctcactattctcaaataaatgtagatggatacaaaactcttgaagaaggtcaaaaagtttcttatgatgttgttaagggaccaaaaggacttcaagctgaaaatattacacttgcataagtaatagagctttaacccctgagtatttactcaggggtttttatgtactgtaaaacttatttgaaatattattagataaaataaataaacttaaaaaactgcacataacatatagggattagcaaattcttatatgttatgtgcagtttttttatatttctagatacgaattcattgatttaaaaaaacatatactttaattttatagaagaattttattaggaggagttagtatgtgtttggctgttccaggagaagttttgaaaataagtgattgtaggggtgttgttaaagttggaaatttaaagagagaggtgtttatgcatcttgtccctgaggttaagattggacaatatgttttaattcatgcgggctgtgcaattgaaataattgatgaaaaggcagcaaaagaaactcttgagattttaaggaagttatcagacgattaaatattttagtctgtagaaggtaagtaggaaggtgaaaactaaaatggagaataagatattattaagccatggaagtggtggtaaacaaactagtagtctaataaataatttgtttgtgaaatattttgataataatattataaaagcgatgaatgattctgcacaaataaagttagttggtactagaattgcatttacaacagattcgtttgtcatttctccgcagttttttaagggaggggatatcggtaaacttgcagtgtgtggaacagtaaatgatttatcagtaagtggtgcaagaccatgttatctaacaagtgcatttattatagaagaaggatattcaatggaaagccttgagctcattgtaaaatctatggccgaaactgctaaaaaagcaggagttaaaattgtggctggagatactaaggtggttgaaaagggaaatgtagatggtgtgtatataaatactacaggcataggggagctgtataataatataaatattagtgctagtagggcagaggttggagatttaattattgtgaatggaaatattggagaacatggtatgagtattatgtgtgaaagaagtggaatagatatatatggagaattgaaaagtgattgtgatcctttaaatgaattagtaggttgtatgctcaaggtatgtaaagatattcatgttatcagagatgctactagagggggcattgcagcagttttaaatgaaatagcagaagctagtgatgtatctgttgagcttaattatgagaatatacctgtaagtgaggaagtaaagggagcgtgtgaattacttggtttagatccattatatattgctaatgaggggaagctttgttgttttgtacccaaagaatatgcactaaatgtgcttaaagagatgaaaaagaatgtattgggcaagaatgctgctattattggaaaagtagttgaagaaactcattataaggtatatttgaaaactgttgttggaggaaagagaatagtagatatgtcgtctggtgaacagttccctagaatatgttaagaattaaaagcattggaggatatcatgtttaaaaggttattattaaaaatagaagggattgtacaaggtgtgggttttagaccttttgtttatagacaggctagtttgcttggtttaaagggttgggtcagcaataattctgctggggtatatattgatgtagaaggtgaaagttcaaatttatatgaattcattgataaactgaaatatgataaaccttttttgtgtagaatagaaaatatcgctattgaggaaaaaacagctgtgaattacaggagttttaaaataaaaagaagtgaggataaatataataaaactactctcatttcccctgatataggtatatgtgaaaaatgtattgaggatatcacaaatccatcaagtaaaaggtataagtatccctttgctagttgtacaaattgtggacctagattttctatattaaaggctattccgtatgatagaaaaaacacgactatgaacaaatttaagctgtgttcagcttgtgataaagaatacaatgattataacaataggagattttatgctgaaactaattcctgcaaaatttgcggtcctcatatttggattgaaaatcataatggagtaaaaatagaagtcgatgacgaattaaattggacaagaaaaaagcttaaagaaggcaaaatttttgctataaaaggcttaggcggctttcaacttgtttgtgacgcagagaatgaagaagcaataaagaagcttagacagaagaagaatagacaacataaaccatttgctgttatggttaaagatattgaaactgcaaaaaagtattgcagtgtaaattataaagaagagaaattactaaaaagtaaagtaaaacctatagttatactaaatagatctaattataataaaatacctaaggtgatagctccatatcaaaaaacattgggagttatgcttccatatactccattacattacttgctattttcagatgatatagaggttcttataatgactagtgcaaatgcccatggactgcctttggagtataaaaatgaaagcgcaattgataaactgggaaatattgcagattattttttgcaacataatagagatataaatgtgccaatagatgattcaattgtaagggtagtaaatggacaagaatgtgttataagacgagcacgaggatatacaccaaatccaattaaaagtgataacgtaagagaaatattggcttgtggatctaatatgaagaatacattttgtatagcaaagaataattttatgtttttaagtcaatataatggcgatttagaaaatgtggaaaccatagataggtacataaataacattagacattttgaaaaaatatttaaatttactccggggtatatagcttgtgatatgcatcccaattatttatctattatatacgacaattattcaaagctacctaaaatagaggttcagcaccatcatgctcatatagttagttgtttaacagaaaataaagttaaaggaaaagttataggaattgcctatgatgggacagggtatggaacagataaaaaagtatggggaggggaattttttatttgtgatacaaaaaagtttatcaggcttgcacatcttaaatatgtgaaaatgcctggcgctgaaatggcaataagagaaaattggagaatggctgtagcttatatttacagtgtttttgaatctggtaaatataatgaaaaacacttattgaaaactataatgaaattatatggtgaaaaggcaattaagcttatagatataattaaagcaaatataaattgtccggaaacctctagtatggggcgcttatttgatgcagctgcaagcttaattggagttagagataatattacgtatgaaggacaggcagctagtgagcttgaagcagttattgaattaaaatgtaagcagtattatgaatatgatataagatttaaagatgataactatattatagagggtgataaagttataaaaggtattatacaagataaaatatcaggggttaccatgggggagatgtcctctaaatttcataatactgtagttgaattttcaaaggatgtatgtaaattgcttaggaagaaaactgcgattaatcaggtagccttaagcggtggagtatttcaaaattcctatttgttaaaaaatttagttgattctttaaaaaaagaggcttttatagtttatacaaataaagaaataccaacaaatgatggaggtattgccttaggacagatcattgtggcaaacgaaattttaaataatagagaaggaataaaataatgaaatatgttgatgaatttagaaatggggattatgcaaaaactcttgtgagattaatacagaaacttactaagaaaaaaataaatataatggagatatgcggcagtcatactatggctatatttagatatggaattaaagatatacttccaagtaatataaggttgatttctgggccggggtgtcccgtttgtgttacgtctcaaggttatattgatactgctttagagctttctttaagtagagaggttatcattgcaacttttggagatatgataagggttccgggaacaaaaacttctctaatgaaaagaaaagctgagggagctgatattaaaatagtttattcaccaatggatgcattgactttggcagaaaataatccgttaaaaaaagtagtctttctttctgtaggttttgaaacaacaacacctattacagcaattacaatattggaggctaaaaaaagaggtgttaagaatatattttttttgacgtcaaataagatggttcctccagttatgaggacacttgtagaagataaggaacttaacataactggttttttacttcctggaaatgttagtgctattattggaaaaaaaccatatgaatttttgagcagtgagtataatgtatctggtgttgtaacaggctttgagccgttggatatacttaagggcttaaaggtacttatagatattataaataacaatgcttcagtaatagtaaatgaatataagagggtagtaagagatgagggtaacgttacggcattaagatatataaaagaagtatttgaagttactgatagcacatggagaggaatagggaacattgaaaaaagtggatataagattaatacagaatatgagcaatttgatgctgtaaaacagtttaatataaattataaagaatgcgatagcagttctgaatgtagatgtggagatatacttaaagggaaaataactccaatagaatgttcgctatttaaaaaagcatgcacacctgatcatcctgtaggttcttgtatggtgtcttatgaaggtgtatgtgcagcgtattataaattccttaatacatgaagagatttataatacgctttttagtttccttatttattgatagtaaaaataaaaatttaatttaatatggagtaaagattaggagaatataaactttgaaaacctaaatttgtatatgctaataaatatataaaatttgccgataaatgatgtttgttaacgataacaataaatagtaaaatataataaaaggttttgttacgataaatattaaatcaatagatgtaaattgcatacataacattgtcatttttggtgtaataaaactaaaataattgatttttttaattaaaatctataataaggggagtttttaaaatgttaaagcaaactaaaaggagattatcaaaagcggttgtttcggcagttattttatcaagtgtatctttttatgggatgtcatcaagtataaaggcaaatgcctcttctagatttaatgcacaggtaggtaaatcagtaggttcaacattacaggatgttgttaccgttgctactttcgatgaattaaaggcagcagttgcttcggcaacaagtggtcaaacaatacaaatagcagctaataaacttgattgtacaagccagttggttcttgataaaattgactcaaatattactatagaagcagcagatggatatactccagtgcttgattttacatcttttagaacaacggctcaaaaacttagcccaaagaaaaccggagatgcctatactggaattagaataacaggtggacagtatacgataaagggtcttatagttgaaaaagcttatgacaatggaattcttataaagccaaattttgatcaagctaaccctgagaatactaatgttggaaagccagataacaatactattgttaattgtgtattccgttataatggtgatgcaggtattcaaatttcgggaagtaagggacttgaaaagttaggaaaggatgtacgccctaataatacccatgtaacaggatgtgtagcttatagaaactttgacattttaacaagtggtggaaatgctgacggttttgcagctaaattatatcttggaactggaactgtattttcacactgtgtatctgctgaaaattcagatgatgcatgggatagttttggagtaaatgatgttgatgtaacttatgatcattgtgtagcatatcacaatggagatcctaaggtatttacaggtgattacgataaggcaaacaatcttcctgtagatactgatatgacagttggaaaatgcagtggtaatggtaatggatttaaaatgggttcgggttcttcaaaatatggacctcaaaccagtggtgttagaaatcttacagattgcacagcagttgataacatctcaaagggttttgatgagaataatggaagtggtactataaatcttacaaatggcatgggctttggaaatttaaaaggtgactatgtacttgatttgatgaaggctggaacatttgaaaatgcacaagcttttagagtaaaaggcttaaagcaaccaagtggaggaactgtatcaattgtagatacaacaagacaagcagctataagagctgagtttgatagttcaatagcaaaaatgagagaggaaattagagaaaataaaattccttcatacatgaattttagtttctggaaataatatgtttagataaaattaaagattttcttataattaaatagaagactgtttcaaaataatattttgaaacagtctttatttttacacaaagttaaccaaaactaaattaaatatataaacttttaagaatactatgaaagtgggaggggaggatatgataactaatacccatttgcttatttcatacattgtatataaaaacttgtataataattttaattttaaattggatatggctgcatttgctttgggaaatataaagccggattttattaataaagaaataaagtgttcacacacattaaacgaaagcttagattctttaattgaatattctaataaacttgttaagtataacaattcaataagaaagttttctctagcattaggaattgtttgtcattatatttgtgactatttttgtatatatcacagagacggaaatgaaaaaaaggggattttagaacatttaatttatgaggtaaagcttgatagtaattttacaatgatgtttttaaaaggaaaactaaattattttggatgcagagattatggtggcagcattaaaaaaataatatttaatattgaaaaagaatataagcttgaggaaaaggactttaaaagagatataaaatatgcactatttgcagctatagaaagctctaaatttatagtttattcaagtaaactttatggcaattaagaggttcttaattgcggttattaatataattatgaaaaaagtcaagggagtatataggcatataataaaatttggctctttatattacattaatgcattatttgccatacaaaaaaatgataaaaattgataataaacaaagtgaattttaaaatacatataatatatttgctacagtattatttaatgatctgataaataaattatgaagaaaaggttctaaccaatttatcttttcaaaattttaaggaatggttagaaaaatatatagtaaagatgagtgatgttaaaatattaattctccttagggaatgtattgagtgtagtaaataactataatttgttttataattaggggttttgaataacctatatttaataggcttcaaaacccttatattagtatctgtagagtatgcattcacatgttgaaccagctccaactgtccaaaagataacataatcgcccttatttagttcattattttctatggtttttgcaaaagctaataatggacttgttgtaccagtgtatccgtatttatctcctataaatacaaatttattctcatcttcatttaattgagcacatatatattgaatactttgtacagcaaattgtgaaagaaagtatttctttatatcacttttttttaggttatttttttttagaagtgtttctatagatatttttgcactaaaaaaagtaccagtgttgtcaaagcgtgtccaatgcactagcttatctttaacagataagtgcttgttgtgtattgtagatgatagacctttagcaggaagaacgattttatcatgtgtacttgaattagtatacgaatccgaatctataaaaccattatcggtattatatgtgttttccaatatgattgcacaagcggaatctccaaagtttgcatatgtaatagcctcatcaaatcttgagtatctatttagttgatcagaacctacaattagagaatactttatatcaggattactcctcatagctctgctagcttggtcgattgccacaagcatgccagcgcaattagcatttaaatcgtaaactgttgatttagaacctgctcttatagattcgtgaagttttattgcgttggtaggagaaatatactcaggtgtgctagtagaaaatattatagagtttattttttgtggatctatatccgatttttctatgagcttttctgctgctttgattcccattgtaagtatggtctcattttcatcatcagatatgtatctatattttctaccagaagattttaataggcctcgtatgtctataccttgcttgtcaaaatgctctataaagtagtcattaccaactaaattatcggggtgatagtacgctatgtctttaataacagcattattacttaacaatttattacacctctattaattaaaattttatttagggcataggaaaataagtatatatcacttatttgtaatactgtacaatataagaaatacatactttattttacattaaatgttataagaagtcaatttttaatatttttaacataatatagacaatattttatttattattcccttcacttaaaagattagataaatcgcttatagtagaatttacttcattcattgaatttacaatagtttcaatagaagcagcttgttcttctgtggatgcacttacttcttctgttgcagcagcagattcttcacaaagtgtagaaagttttttcatagaatcaagtgaaatatcctttaatttttttatttttttaagttcttcatttagtaaatttattagatcaactatattatcagaagatactaaaattgatttaaaacagtctacggttgttgataatttattatcagattcactcattatttctttattatgtttcatggttttttgagtggtatgaacgatgtttattatttcactaagtatatctgacacttcttttgtagatgaggaagattgttctgcaagttttcttatttcttctgcgactacagcaaaaccttttccggattcaccagctctagcagcttctattgcagcgtttaaagctaaaagatttgtttgttctgcaattccatttatagtttgtattatatttcttattgaatttgatttttgtgataaattttcaacttcattaaatacggtagttgttgaggttatattttcattaaatttatctgaaagatcatctatagaagccatacctgagttattatttgattttaaattattaatactatctatagtagtgtttattttatcctctgcatttgttatgctatttgctaaattattaaaagttttaaaagtaatttcaacttcgttattttgatttattgagcctgaggcaatttgttgagaagattgtgatatttgctgagatgaggagttgaaattatttattgaatcatatataaagctggaagaattttttaaggtattaactatattacgtacgctttttgttaaccttttctgcgaatctaatagtttattggattcagactctttagtctcaagattacaaaatattttgtaagtctgatcagcaaccacagcagctattatagcagctgtcacaaattcgaataataaaaaaatccatacaggaaaactgtttaattttaaaaatgaatccttaaaaataaagcccattatagaatttgaagctattgttacaatactttctaccaaaactactttcctatcataatatgctacagccaataacaacattagaaaataagcttgagtcatagcgccaaattttccatcattagaatatgcgataactattccgccgataaaaggaattatagaaatatacaaatattttgcatatttgttaagaggtttttcaaataattttactaataatgctataggacagcctatgaatgcaattgaatctttataataagttccgtttaaaaagaattttacaaaaataaatgctataacgggcatcgaaagacttagtgtaaataaaaaagaattcatttttttttcggttttatttaataaattggaattcaccataatcaccccatcataattttgtatgaagaaattattttttatatgaagtttttaatttcttcagctactcctttagcatttactactaataggaaatgcttaccggtttcaaagatttttaattctgaattttcaacttctttctttatgatttcggaatattctactagagtaagtagctcatcttttgctacaattgcctttacgggtatatctatattttttaaattatcaactaaatcaataagcttacaggcaatcaaatcatttatcattatatctggatccttttcaagtgtttcaaaatatttttcagatagtggattatctatacctccaatacattctagtaaatagttattgtcaagttgattgtgataaattttttccataaaatctttatctagtttgtcaaatctagcaccgccgcttaaggatacaacttttcttacattcggcaatttttttaatgctactcccaaaactatagctccccccatgctatatccaattaaagtaatatttttttggtgtttagttacttcgctatttgttataaagttagcaacattatcaatatagccatatacagtagaaggacattgacccttactttcaccatgtccctttaaatcgagaagtatacaattataatcttctaaatatttttcaagttctccaaatatttttaaattgcatccgcttccatgaacaaaaagcagtgtatttggacttttcttgtttccaacatgtacataatgcaacataattatcactcccaagattttatttgttgaagcacttaaggtttatatttttgtaaaaaagttaataatatggatttatttcattttatgaataaatatagtaaattaatcaaaatatactttaattatacatcttataccatgagaaatcaaagctttatacaaagatagtatgagagataaaaggtaaatatgcgttaagaaattatataggtgggataacatagtgaaaaataaattaagtaaaaaaacaaaagttttctgttttttataatacttttgtttggattaatctcagtttttgtaatgtaaatataagatgtagaagtagacggaaaaatagtaatattagtggagatagccaagtgttaaagcttacatttaaagttaatggagacggcaaggttgataacgaagacttgaagataatagcacagagtacaacacattaataaaagttcaactgaaataatagggagtttaaatttgttagttattaaagagataacaatacaagtttaaagtctctttttatagaaaagccaatgataaaaaacaacaataaaatacaaaattcgactcaaactattgataaatgttatacactaatatattatttaatataatatggttatagtggagtgcaaaatatatgaaaaaaattatagttgttattgtattaattattttatggttaggtatacataattatctgtttaataataaaacagttagggtaaatgtttataaaggaaacataaatttaaagaattatgattttgacaaaaataaaattgtaaaattagaaggtcaattagaactttacaataacaaattgctaattccatctgagttgaagggagagaaaagcagtagatatttaacggtgcctagtgaattaaaagatcagcttaaaggaaaagttgatgagtatatgacgcttcacttaatggtgcaagctaaagatgatgtagtttatggcttaaagatagatgagcttttaatggattctaaagtttggataaatggaattctacaggataaagctgggatagttaacaagagttattatagtgaaagacaggtatacttacctggatactactattttaccgcgaaaaatggcattatagatatagtaattcaaccttcaaatcacataaatatttttcatgtgattaagcctatatattttagtacaaaagataaaattatgaatgaatttataataaatgcaagcatagatcttatagtgtttggtgggttaatagttacagagttaatatttttaattatagcttttaagcttaaaaaaagcaaagtattactatacctttcaatactaggagtttttgttcaatttaaatgtctttttcttaatgaaataataatagtacacttatttccatacatatcttttgaaatattgagtaaaattgatgttctgacaaactatttatggataccagtctatgtattgtttataaagaagaaattttatgatttatctaataaaatagtttatggaatattcgttttttattttgtatatataacaatgtgtattgtaacagataatatactttatgataaatttatgttttttgctcagcctatattgtacattataataattattatattagtgtttttaataggaaagataagaaataaagtagtaggaagtggagtgtcaattgttgcattttctatagtaatattaaattgtataaatgattcaccagctgatggcggggcagtatatagcagatcaagttttgtaatatcaatgtttattcttatacttattgaaacttgtacaatagtagctaagtattgttccgaaatcattcaaattgaaaaattgagacatgaaaataagcttatatatgaaaaatccataaaagataatcttacgggaatgtataatagaaaccacatagaggaaatactggataaagagattagtgattacattagatataaaaaattatttactatacttatgatggatatagattattttaaatcaattaatgataagtatggtcatttagtaggagataatgttctgagtgtagtaagtaatgctataataagaaatttaagaaaagaagattttgttggaagatatggaggggaagaatttatagttgtttttccaaatacagataagaaagaggcttttataatagcggaaagaattagaacagacatagagaatctgttatttgaaaatggtataagagtgactataagtggtggaatatatgaaaactccagttttagtaagaaggtatgtatacataatgctgatagacttttatattatgctaaagaaagtggaagaaatagaattaaaatgtagaaaataaaatttaattctacatataacttgataaaattcgcaatattaatatatatgtccccttattgattgaatatatgttaaaaatatttaacgaattttgtaaagattataaatatttaattgtaaatgaataactattgacataatttgattgaatacctagaattaattaaggaatataaaagttgtggaggatgaaaatgaatagtcaagattttaactataggaatggtgaacttggaatagttgcactagaaagctgcagggagctaggacagaaaattgataatcgtattaaaacaaagagaaaatcagaagactcttttttaataccaactcaggaaatacgtttttcaaatggagaaggtaaagttaaattatcggaatctgtaagaggtaaggatatttatatactttgtgatgtaggaaattacagttgtacatataatatgtttggaatagagaaccataaaggtccagatgaacatttccaagatataaaaagaactgtatcagctataagaggaaaggctagaagaataacagttataatgccgcttttatatgaatcaagacagcacagaagaaagggaagagaatccctagattgcgctttagcacttcaagaattagagagattgggagttcaagaggttcttacttttgatgcacatgatcctaatgtacaaaatgcaattccattaatgtcatttgaaaatttgtatccaacatatgatatagtgaaaacaattatcatggaagaaaaaaatatagaagtaaataaaaatagtatgcttgttataagtcctgatactggtgctatggatagagctatatactattcaagtgttttaggtgttgatgttggattgttttataagagaagagaccattcaacaattgtaaatggtaagaatcctatagttaaacatgaatatatgggaagagatgttgaaaatcaagatgttttaatcgttgatgatatgatagcttcaggagaatctgttttagatatagctaaggaacttaaagcaagaaaggctagaaatatttatgttgctactacttttgcattctttacagaagggttagaaaagttccaaaaatattatgatgataatataatatcaagagtttattcaactaatttaacttatataccacctgaacttgaaaaaactgaatggttcagaaaggttgatatgtctgaacttatatctagaataattcataaattaaacaaagatgaatcaatagctaaatttatggatgctacatatgtacttcatgaattattaaatagcagaaaaaagtagagttgaaaaatgagtttctaaatttttattagaaactcattttttatttttcagttagatgttaatataaaagtagtattatatttttattagtataagagtgtttttctgttggaattactgaaaaaagtagagaggaggttgacttgttacaaaaatacagtgtatctgtttgagaaacatctttttgaaaacacaataatataaaaaattaaaaggagaataaacctatggataaaattgaaattcctgaactatttaaggaatttgaagatagaatactaaagacaatgaaggtttcaaatgaaattacatataagaaaggaaaaacacttccttgggagagtaaactaggaggatgcccttatatggagaaaatagaagagtatcctaaagataaagatggagtaccatacttttttttagcacaaattaattttgaagaaattcatggtataaaagattttccgagtgaggggattttacagttttatgttaaaagagatgatgtgtatggattgtatgaagaggatggctttgttgttagatatgttgaaaaagtaaataataacaaagaaaatttagtagaaaatgtaccattagtggaagataacgagcaattttatccaccatatgagcatgagggtaaaatgctattcacattaaggaatatgcctgtatctgtagaggataataagtttaataaagtattcgagggaattgtttttacagaaaatcaggagaaggaaagttatgaggtatttgatggatatggtaatagagtaggaggatatcctggttttacgcagggagacccaagagacgataaaagttatgatacacttctgttgcagcttgatatggacgacgagtgtggaattatgtttggagattctggagtagcaaatttttttatagcctccgatgatttaaaaaataaagatttttctaaagtttattatacttgggattgttgttaaagtaatatattttatgaatgaaaatcagtttttaaataaccctcaagtgttaaggaaaactgatttttattgtttggaagtatacgtattcatagtagaaaaattggattattaagtatatagcattattgacaacaaaataaaattacagtaaactttaaaagagaacggaggttttctaatgcaatatttgaaagaagagatgagaaaaagaataatagatgaggctttaaaggaattcttaaggttaggttatacaaatgcctctgtaagaactatagttaagaatgctggaacttctgtgggaaacttctataaatactttggaagtaaggaggatttatatgaaaaaattatagaccccgtatataaaaaacttattaagtatttgcatcaattttctgaggttgaggtaaatgaacaagcgcaggcaatcttttatgagctaatggaaaaggttatagagatatttgaagaaaactgtgatgaattatcaatgcttttgaatagcagtacaggttctaagtatgagaactgcagacagatttttattgattttataactaatacagtaactacaagttttgagtatgagctttatatgaataaaagaacaattaaagataactttataatagagcttttagctcataatcttgtggatgatatagcgataattttaagaaaaaagaaaaataaaacacaggtaaggaaactcattgtcaacttgatagatattttttatggaaatataatagataagcttgatattcaagaaatttgaatgtaaaggaggcatagaggtggaaagttttattgaacttagagatgttagaaaaatttataatatgggtgaggttacaattaaagctgtggatggagtatctttttctatagatgaaggtgagtttgtcattgtattaggtgctagtggtgcaggaaaatcaacaatattaaatcttttaggtggaatggatcaagcaagttcaggcagtattagcgttgatggaaatgagataagtaattacaataaaaagatgctaacgaaatacaggcgcgatgatataggttttgtatttcaattttataatctagttcaaaatttaaatgcactagaaaatgtagaacttgcagttgagatatgcaaaaatccaatggatcctgttaaggtgcttgaaagtgttgggcttaaggataggatgtataattttccttcacagctttcaggaggagaacaacagagagtatctatagctagagcattagctaaaaatccaaagcttctattgtgtgatgagcctacaggagcactagactataatacaggaaaggcaattttaaaacttctagcagatacctcaaaacaatataatatgacagttatattaataacacataattcagctatagctccaattgcagataaaataatacatgttaaaaatggaagagttgagagtgtaaagaagaatcaaaccccagtgcctatagaaagtatagagtggtaaaatgaaaaaaacattctttaagaacttatttaagagtatatctacaacactttcaagattcttatctatattaataattatagcagttggtgtttctttttatgttggagttagagcttcaagtcccgatatgaaaatgtctgctgataagtattttaatgatagtaatttcatggattttaagctcatatcaacattaggtttaacagataaagatgtaaaagaagtgagaaagctaagtaaggtaaaagctgcaaagggatccaagtcaatggatgctgttattgaaaatggcaaagatacaatagttttaaatgtagagtcattacctaaaaaaaatggtgtaaataaagttcaagttgtaagaggcaggcttccaagtaaaaatacagaattagcggtagaagaacggtttttaaaagagaataaatttaaaataggagatgttttaaagctaaaatcagggaatgatactaatatagaggatagacttaaaaattgcagttttaaaatagttggaacagtaacttctcctctttatatatctgcgcaaagacaaattagttctgttggaaatggaaatgttaaaggttttgtatatataatgccagaggcttttaaaaatgatgtatatacctctatttatgttaagataaatgaaccttactctaaagatagtcttgcccaaaatgctaaatataaagcgtctatagttaatgtaaaggaaaagcttaagacttttgtaaaagaaagaggagaagcaaggcgtaaggacatagtaaaggattcagaggataaaataaaagatgcagaagataagttaagtgcttctaagaaagaagctcaagataaatttatagatgcacataaaaagctcgatgatgcagtagttaaacttaatgatggaaaggttcaattacagaaaaatcaaaatgactttaaaactcaaattacaagtgcagaaaatgaaattcagaataagaagagtgaaattcagcaaagtgaaaccataataaattcaaaattagctgatgcacaaaagagtaaaagcactttagaaggtgctgaaaatcaaattgtattaggacagcagaatttagataatcagaagcatgcagcagcagaagggatttcagcagctttaggaaaagcagtttctgacgctaagaacaatcttaaaaacaatccttcggatataacatgtaaggaaatatataataatttaaatgatgtatatacaaaagatattcaaggaaaagaatttgatgatatgtatgagagtctaaaaagcagtaatagtcttgaaaaaataagttcttactttgatatcaaaggagcaaaagcaaaatttgattcagcacagtcagaaatatcttctaaaaagcagacaatacaagataatgaaaaagcacttatttcaggagaagtccagctccagaatgcactcaatcaaattaatgcaggcaaggataagatagctaagggagaaacagagctgaattccaaaaagaatgaaggcttggaaaaactaaatgctgcaaagagaaagattgacgattctgaaaaggagataaatgaaaacactgaaaaattaaagacagaagagacaaatgcaaataataaatttaataatgctgaaggtgaaatacgaaaaaatagagataaattgaatgaggtaaaaaaaccagatacttatgtgctcggtagaaatgaaaatttaggttacgtaaactatagtcaggacagtgatagaatagataatataggaaaagtatttcctttaatattcttccttgttgcagcacttgtaagtttaaccacaatgactagaatggttcaagaaaatagaactgaaataggcacatttaaggcacttggatattcacctaaagtaatagtatctcattacttaatttattcatttacagcaagtattattggcagcttgttaggaataattatcggatttgaggtatttccaccacttatagtaaatgcatatggatctttatatgcagtaccacattactcgtcttttgatagtgttatttccattgaggcagttataatagcagttgtatttacaacagtagcatcagccattgcagttcttgatgagctaaaggaagttccggcatcacttatgagaccaaaacctcctaaggcaggcaaaaaaatattgctagaaagaatgacctttatatggaaaagatttagctttacaaaaaaggttactgctagaaatatatttagatacaaacagagatttttaatgacagtaataggaatagctgcatgtacaggacttatgataacggggtttgggattaagagtggagtaataggtgcagtagaaaagcagtttagttcagtgtataaatatgatatgcagaccacaataaacaaaaatatagatgatagtgagaagaaagagattaaagataaggttaatagtgattccaatataaaatcagtactattttattattcaaaaaatgccactgtaaggaaagaagacaataataatgaagacataaacattgtagtacctgagaaaaaagcacaactaaatgaatatatagaacttttcaatgatagtggtgaattaaagctttctgatgatggagttatagtaacggaaaagattgctaaattaatgaataagaaaaaaggtgacgtatttaatataactgtagataacagaattataagagttaaaatatttgatataacaaaacactatatacagcattatatttatatgagtcctaaatattataaaaaagttactggggaaaatgcacaattcaatgcattttatggacttttaaagagtaaatccagtagtgctgaaaatacaacatctaaaattatttcgggtattaaaaatataggtgcagtaagctttaaaaataatacacgatttgactttaataagagcacaaaaagcttaaactctgtagttttagttttaatagtatcggcaggagttcttgcgtttgtagttatatataatcttacaaatataaatataaatgaaagaaatagagaacttgcaactataaaggtactaggattttatgataaagaacttgcgatgtacatttatagagagaatattatattaacaataataggcagtttagtaggtataggtgttggaatgcttttagacgtatttgtaataactacgactgagacaaatgtaatgatgtttttaagaactgtagaaccgttatacattttgatttcaatttttcttaccatagcgttttctgtaattgtaaatattgctatgtatagaaggttttataaaattgatatgatagaatctttaaagagtgcagagtaagtaaattttagtaaagacattttagacaaaatactaaaattaagaggaaggtaaagctaccatctcttaattttagtgactattaagtaaataggtggtgaagttatggaaagtttacaatccataaaagaaataagaaaatacatagaaaacaatgaacttgtgcttatgtactttagatctgataatagcggaatatgttatgcattagaccccttaattgaagctataagtaaaaaatacagtaaaatttcctcagttaaagttaacactggcaacttgccttcagttcctgctgattttaaaatatttactgttccagaagttattatatttatgaatggaagtatagttatagaacactttaaatatataaattttagggaaattgaagaagttttattacggtattataaatgtatttaataacctagtttgattaaatttagaataaaaaaataaggaaacctattaggccttccttatttttttacttttaatcccgttaaagcatgcactattttagggcattcccatctaagcgtatttctattaaatataccataactatcttttgctccagaagagtaaacaccattatcccaccatataggagcaatacttctctttttagcggcactaacatagtattttgctagagatgctctttgattttcattatttttattcactgatgcaaattctccaattaccacaccatagccttttttgccaaatttcttataaatcgcattaagagtgctgtctaattcttttttatcctttgcgcttccccaagatgaagttccattgacattcattgcgaagttgtatggtatataagcatgaagagatattaatattttcttatcattatttggaatttttaagccgtttattgaaattttatctgaagaggctgcatatgttggtatcataataaatcttgatgaattctttgcaccggtgtctcttatagcatttacagctgctagattatagctattaacaacatcgcgagcttctgaagttccgccataccactcctcaggtgtacctattaatctaggttcattcattgtttcaaatattagtgagtcattataatttttaaagcgatttgaaatttgtgtccacagctttgtaagttcagctgtagccgcatctttgttagcgtaagttggtataagccaagaatcctcatgatgaagatttatgataacatacatatgattgtcataagcatagtttactacttcttgcactctgtcgagccaagcattatctattgtgtaatcaggagctggtcctatatgactattccaagttattggaattctcacagtattaaatccggcttgcttaatttttgtaatcatggatttggttgttttaggatttccccaatctgtttcgttaaaaggtgaatctaatgagttacctaaatctaagccaaccttcatatttttaacaatctgtaaagatgttattttttttgttttcgtttttgtgttattagtagctacaactgtattaagatttaaagttaaatatgttccaagtaaagttaatgccaaaaacaaaattttgactttcgaaaataaacgtctaaacaatgtgttacctccttaatatagaagtaataataaatgataatattattactttaacagatatattatactttatattcttaattttgtatacgttgtatacattaaatttaatataatttaatataataaagaggtatattaataaaaagcttgaaatatataaaataaggagaataattctatataattagaattatatgatgattttgcatatataaaattgttgatatattgtgctatgtatgatatgtatattcaatataattccaataattacattttactactcaacaaaaataggagaatatcttatattctcctattttgtattctatctagctgagttaactattgttcttacgagttttggaaaaacccatgttagattatttctatctaatataccgtaattatcgtctccaacagcagatttgccattatcccaccatactgtggttattcctttttttcttgcgtctgaaacataaaattttgctaatgatgctcttgaactttcgttatttttattaattgaaccaaattcgcctataactacaggctgaccattttttacgaatttattgtaaattgcattaagttggccatcgagcgcatccttatctgcttctcctccccaatgggaagttcctttaggatccattgcaaaactatatggagcatacatgtgtagtgaaactattactcttttatcgttgtttggtataactaaatcattcatagcagcagttgctgtagaagctgcgtaagttggaaccataataaatctagatgagttatttgaaccagtacttcttatagtatttacagcagttaaattgaatttattaattacatcacgagattcagcagttccaccattccattcttcaggtgaaccaactattctaggttcgtttaatgtttcaaaaattaaatgactatcatagtctttaaaacgatttgcaatttgtccccaaacctttgtgagttcatcagttgatgcagcttctttattgtaagttggtataatccaagaagtatcatgatgagtatttaatatagcatacatatgatcttggattacataattaactacttcttgaactctattaagccaagcttgatcaatagtgtagctaggaccagcacctatgtggctactccaagatacaggtattcttacagtattaaagccagcttctttaattttgtcaatcattgcctttgtagttttaggatttccccaacctgtttcatctggagaagcatccaaagtgtttcctagattccaaccaaccttcatatcattaacaatttgttgtgatgtcatatcatgtggatttacagttgcggcacatgcactataagctcctgataaagatgttcctagaaaagcaaatgttagaagtgaaatttttgcttttgaaaataaatttttaaacatagtatatagcctccttgataaaagtaataaataaaatttactttgtttacagatatattatactgtatattttgggagttgtatacataggataaccaatacatttgccaatataagctgattagatttgaaaatatgaagaatattgttaaaagatagttttttttagaattatcaaagaataacgaataaatatgatttattatgtgtgtaaaaatagaaatttacataattttatttatgaaataaaaaaaagcaacctataataggttgctttttagtattaagctctgtttactgaaccaaataaaaccattttttcttttactttagcttttattgcttcaaaaccaggagctaataatttacgtggatcaaagccttttccttgcttatcttttccttcttcaatatatttacgagtagcttctgcaaatactaattggcattcagtattaacattgatttttgcaacgccaagtgatatagcttttgcaatcatatcatcaggaattccagtaccaccgtgtaaaacaagaggcatagttcctactgcattttttatgtcttctaatacgtcaaatcttaatccagcccagtttgcaggatatacaccatgtatatttccgattccagcagcgagtatatcaacgcctaaatcagctatttttttgcactcagcaggatctgcaacttcaccgcttccaacgactccatcttcttctccacctatggcaccaacttctgcttcaacagaaagtccttttgcattagcagcttttataacttcttttgtcttttctatattttcagctatatcatagtgtgaaccatcgaacattactgaagaaaatccagcttcgattactttaaaagcaccttcatagctaccatgatctaagtgtaatgcaactggaactgttatatttaaatctttcattaatccgttaaccattccaactacagcgtgataaccacccatatattttcctgctccttcagatacacctaaaattacaggagatttgttttcctgagcagttaataatattgctttagtccattctaagttattgatattgaattgaccaacagcatatttaccttctctagctttatctaccatttcttttgctgatactaacataactttacctccaaaaataaatattttttagagaaaataatatttgaaaaatttctctttactaaagttattataatctaaaattgttaaaaagaaaacaaaaatttttagttacaaataagaatactgtattatataggacaaatttcgttgagttctacaggattatcgtttaaatttaaatatatcggctgtactataattaaaaatttaacaacttgtatttttttataaacaataatatgtatagtattgcttgaaaatttaaaaattataaagataagatagaaaaaaatatacaaattctttttactagttgtctaatctaacatatgaatatgagcttaaagaggatgtattagttaagtgtatagtattgcctttaaggtaggttactttaaattttataactttacttgcagttataggtacttcttgtccatcatttataaccttacttagtgtgaaagttagaatattatccttagaatatatataggttcctgtaataacattcttttcatcagcgctttgtttgtaaattttgaaagagctatcattgtttaatactagtctcttatcagtagtgctgttgctgtttttaattccccaggaaccgtttaaatcttttatatttatatttttagtgtcgggattaggagaagctttcttatatactttaagtgttttaaacatgttcataatcatatctctatagttatattttttatagctatcatcagaagcctcaaatttaaattcatattgataatctccatttataactactaaggtgtcggaatctataattgaattatcagctcgaaccctgctgtgaacaacggcgtatttcttattttctacttttatgtagctagttgaagtactgccttcaatggaattcttcttatatgtattttcaagggcagaaatgtactcatcttctgttagattttctgaataactattacattttagaccaccgactaaggcatctgtattttttttctttaaggcaattgcattttgacctctattagtgccttcttgccactgcgtaggattgtaattaatagatacagctttatcatttgaataaaacttactagaaagagaaagagttacagattttgagtttaaattgcagcctgtaagtaaaaaaatgaataaaggtgaaagtatagttaattttttaaaaaacgacggcaaatttgattttaaatatttgattgttttcataaattactccttaagttgaatttttgatttaatttaatttaattaaaaatattctaaaatagcataacaattatatcataattacttccattttcaatataattaattttaatatgagataagagtaatatactgatagcatcttggaatataactactaaattaatgtgactaaaatatataaagataatctttatagttcttaagatttaattaaatttatttttaactaataatattaaagtaaatctataaagttttattataggaggatttaatgtgaaaaagattaaaaataaaaagaagatatttaaggtgattttatttggactatttataatttacataatagccttatttaaaataattttatttaaaagcatatcatttctacagatttttaaaggatacaataagtcaaggtctattaatttgataccttttaaatcaattattcaatttattgacacctataaagaaatggggagctttagagcttttgccaatttagccggaaatttaattgtgttcatgccatttggatatcttgttcctacattgaataaacgtttttctagaattagaagtacagtaatagcttcctttggtttgagtttgtttttcgaggttacacagtatgttttggaaataggaagcagtgatatagatgatattatactgaatacccttggagcagttgcagggtattcagtacttacttgtttaagaaaaatttcaagtaaagttgtaatccagaatttttgtattatgtgtattacagtaatatttttaataacaggttcgattgtagcatttagagagtatggtgtaatgcttaatttgacaaaacttaaggaagtaattaatggaggacgtgatattcctaaaattagcgctgatgctgtaggacatactgtgcaaataaaagagaatgatataaaactcgaaaaagtaagcatatataataaaaataaaggaggaaaatcacatgacaaaggtgaaagaaatatagatatagtctttaataagtcaactaaggtttactttgagagagatgactataaagataatacaatgacaattacaaacataaaagttaatgaaaaaaaattatatacgttgaaaaaaaattcaatgatttcagtttggggaaacaacagagaggggaagctttttgctaactttataatagtgtacttaaagtagtgaggaaggggataaaatgctaaaaatacttgttgtagatgacgacatagaaattttaaacttagtttcaatatatttaagcaatgagggatatgaaattataaaagctactaatggttgtgaagcaataagtaagattaataatgaaaaacctaaattagtaattttggatgtaatgcttcctgatatagacggtatagaggtttgtagaaagattagagaaaaattaaatgtgcctataataatcttaagtgctaaagttcaaaatagtgataaaatcaaaggtcttttaactggggcagatgactatataacaaagccttttaatcagttagagtttatagttagggtaaagactcttcttagaagaacgtatttatttgatacaagaggtaataaagatgatttagatgacatagtgcttggaactttaacaataaaaaagtcaacccatactgtattaataaataataatgagataatacttacggcaacagaattcgagatactaaaattattggctattaataagggaaggatttttagtgcagaagaaatatttgaaactgtgtggaaggaaaagtactttcagtcaaataatacagttatggttcatataagtaatcttagagataaaattgaaaggaaattaaatggagaaaaattaattcatacagtttggggagttgggtataaaattgagtaagcaagcagtgtataagattgaacttaaaatatttggatattttatacttatattaatgctttcaacaataacagtaattttaatgttgattgttaaaaatgctttagaagaagttttaataaggtataatgaaaatacgttaatgacagctaaattcttgttttgtgatgtgaaaaaatttagtattgttatgtatttttttgtgtttgttatatggagtcatttattattaaagaggaaagtacagtattttataaatttaagtgaaagtacaagtgaaatagcaaaaggaaactttaaagttattataccagttaagagggaagatgaatttggtaatttggcaaaaggaattaatgagattgtagaaaagtttaattttatattgaaaaaggaaaaagaaatagaaaaaacaaaaattgatttaataacaaatgtctctcatgatcttaggacaccacttacatcaattttaggatatttagagcttgtagaaaacgatcaatataaggatgaggttgctctttggtactatattgatattgcatataataagacaaaaagacttaaagtgctaatagatgatttatttcaattgactaccttaaacgaacattctatgaagttatgtaaaaaagaaataaatattgcagagctattaaaacagcttattggagagtatatgttgaattttcaaaaggccggcattaggtgtaggctaaagcttactgatgaaaaattgtatgttctaggagatgctgtgcttttaataagggcttttgaaaacattattattaattgtataaagtattctaaaacaagtgagattatggatgtatcggtgcaaagaaaaggagatatggcggtacttaattttataaactatggtgagcctataccagctatagatattccatatatttttcaaagattttatagagttgataagtcaaggtcagataaattaggtggttctgggttgggacttgctatagcaaaaaatattatagatataactggtggtaatatagaggtggaaagtgatacaactagaacaaattttaaaatagtattgccttgttatggaaaataacattgacaatatccaatgttgggtataatatatatattagcacagcataaaaaggagaaggttatggttaaagcattagttttatattttttaagtgtaaaacctacatatggttacgatatacaaaggtttatagaaatagatggaatggatcagtgggctaaggtgaaatctggttcgatatattatgccttaaacaagcttgaaaaagacggttttatatttacacttagggaagaaagaacaggagcaagaataagaaaaatatatgctattagcgacaaaggtgtagaagaactaagaagagttttaaaagaagaattattaaaacctattgataatgttgaagcagataaatttatgatatatcttatgtttaatagattggaaagagatgaaattatagatcttacaagacagcatatacaaagtttagagcaaagaaaaaagtggtgggaagacggcagaaaaattaaggtttcagaagcaacgcttaaggttgaaatacttcattttgataatgttatagctaatttagacaatcaaattaaatggcataaaactcttattgaggagattgatgagataattaaattttctaaaggagtagaacagttaataagaaaaattgattttggagctctagaagatgtacaatacaagagtaaatgcgaagatggagatgtggtgaaacagatatctaatgtggcagatgatataatgaagaatccaactgatgttgaggaaaaaatagaaactttgattaaacttttaagaaaacattagacttattatgttttgtaaagttgaatagtgtttataaaggaagctttcgtagtttccttaaaaaataaaattaatatccaacgttgtataaccaatataaaatacaggaggaatagcgatgaattatattttaaaggtgaaaaatattgaaaaaagctatggagaaaggaaggccgttaagggaattagttttaatgttgaagatggtgaagtacttggttttttgggacccaatggcgcaggtaaaagcacaagtataaacattatatctacagtagttgattttgataaaggagatatcttttttaaggataaagacattattaagaataagaatttttttaaatcaaatttaggtgtagtaccacaagatattgctgttttttctgatcttacagcatacaataatgtaaaattcttctgtagcctctatggttttagaggaaaaaggcttaaagaaaacgtagaagaagcgctaaaatttgttggattatgggaaagaaaaaatgaccttccaactagtttttcaggaggaatgaaaagaagacttaatattgcctgcgctatagctcataaacccaagcttttaattatggatgaacctactgtgggaatagatcctcaatctagaaataatattcttgaaacagttaagaagcttaatgaaaatggtacaacaataatttatacatcacattatatggaggaggttgaaagtgtatgtaataagataataattatggatgagggagaaattattgaagatggatcaaaagattttataaaagccaagtacaataaagaaaatttagaagaaatatttttgtgtcttacaggaaaagctttaagagattagggggaaaagctatgaaaggattttttgtattacttagttatggatttagaaagagatgtaaggattttttttgataatatacaacattgtatatccaatgattcttatactgctttatgagtatcttgccgtaaattactttaaaggagataaatctattacatcaagttattattacgtaattgttttaataccatttttcatatttacaaatatcattacaatggcttatgtagctaaagatgagagccttagtaaaacagcatatagatttttaagtgcaccaatagataattcagctatagtattgtctaaaattatatcctgtactgtaatttcatgggggtgtagtttgatacttttgataattagtaaagttttattaagcgttaattttgaaggtagtacattaaaaatattaattttgttctttactgaaaattttatggcagcagctattggaatatttcttggtatagttatgaaaaatttcaaaacaataaagggaattttaaatataccaatttcaatacttggagtacttggaggatgctttttccctgtaggggcacttgggagaacttttgagaaggtaagctatatttctccatttacatggattaacagagggattatatcggaggtatatgataaaagtcaaactattttggtgggaactatacttgttactctagtttttggaattatattttcaattggggcatcaattttatttaataaggaggtgtttttataatgagaactatatggttggtatttattgcgaattttaaaagagcctattcaaataagaaaaagttctttataaatcttttggttccagtagctgcaataattttagctattgtagtaaattatgtaagttcaccatcgcttaatataggggtaaatgagaaaataaaatctaaaggaggcgatagaatagtaaaaatgcttaagcatactagaggaataaatgccaaagtatgtcatggtgaacttatgaaaactgaagttattttaggaaagtatgatgctgtggttactataaagaggaaattaggtaaaaactcatttaataatatgagtaagtattttgaattttataatgttagggataaaaagacaaatgaagatatgaaaaaactgataaaagcatatttggttcaaaataaaactttaaacatggagagaattgtaaaagacgagcagattggtggactatcaaagtccgaaagaataatagcttttttagctacagtgcttttaattacttcagttgtaaatggtgctgttattataagagatagagaagaaaacacctattatagatatatgtattcaccaaatagtaaatttgaatatatatttggtaatgttatatacaattatatattcagctatattcagctttttatagccaatagtttaatggctatttttggaatatatatagggatttcatttttaaaaatgctttcatatggcttaatattaactcttgtgatgactacctttggaacttttatagtgtgcatatttaataaagaattatatgcaaatatgttttcggcagctataagtcttatactgtcacttgtaggtggaacttttataaattataaaattatgccagaaggattaagaagaataagtgatgtaacgccaaatagatggattataaaatctgttcagtatatgcagaatggaagatttggttcaataaatccgatgatggtattaatcgctttttctattatgttttcattagctgctgttttagttagtaaatttcataaagtccagtttaaataaagtataattggttgaaagtgattatcgatgtaattattatataaactacaaacatgcttgaaaaataaaagtgaataatatataataacaaaaaagtaatatagtttaaaatataccactagtgtaaaattgttataaaaataaagcaaaaaagaaggagtaaaatgatagttgataaattagaaaatgcaagtctgtatgttaacatgaacaaagaaatggaaagggcctttgaatttttaaagaatacagatatacagaagctttcggatggaaaatatgaaattgattctgataatgtttatgcatcagtacaaagctatgaaacaaaagataaaagtgaaaaaaaatttgagtcccatgaaaaatatattgatattcagtacattgttaagggaaaagaatttatcgaatggtcgccaattcaaaatttaagtgtagaagaagcgtactctgacgaaaaagatgtaattttttataaggatggtaaattatcttcaaaaataaatttagaggataactatttctgtatatttttccctaatgatgggcataaaccaggctgcacttttgacaagcctatgaatataaaaaaagtagttctaaaaattaaaatatcataaaatagtagaaaaatcacataacattaacagaaatataaaatgatgacttcctaattgaaagaagtcatcattttatattattttttagctgttatattaacccaggcatcattataaagttttttaaagtttcctaagtctgtaaatacttctgaattctttaaggaggcatcgtcaggatatgatgctttgttattttttactttatcatttaacatatcaaaggtttttgtgtttggagttccgtaacctatataatcaacatttttcttatttacctttgcatcaagtaagtaatttaagaatttttcagctgcttctttattctttgcgtttttaggtataacccaactgtcgaaccacaaatttgttccttctttaggaattacatattcatatttgtttggattttcattcatcagtacagctgcatctcctgaataaataacgcctattggcttttctccgtttctcatgtcatctttgatttcatcaccaacatatacagggtttataagctttttttgttctattagtgcactagatgcttttgatatttcatttttgttttttgaattcattgagtatccaaggcgtttaagtgatatgcccaaggaatttctcatgtcatctgacatatatactttatctttatatttaggattccataggtcattccagctatctaatttatctttaatttgagttttatcatatattatgccaattgttccccacatatatggtactgaatagctattctttggatcatagcttaaatttttatatttgttatctatattagaataattggataaactcttaaaatcaattttctgaactgaattttctttaatcattctatccaccatgtaatcagatggacatataagatcataattattagttcctgatttgactttttcatacatttcttcattagttgagaaggtttcgtagtttacctttataccagtttttgctgtgaaatccttaagaatatctttatcaatatattcgccccagttaaaaacagttattgtttttttatctgaaccaggttttaagttgcaggcagttagagaagaacaagttaagatgactgttgcagcaagtgctatgattttctttatatttttcatttcttttcccccttagatataatactttttctatttgcaagcagtaataaaataagaatagttacaaacattaaagttgatagtgcatttatttcaggtgtaattccacgcctagccatagagtatatttctattgagaggtttgtaacatcgtttccagtattgaaaaagcttattacaaaatcatctatagacattgtaaaggcgaataaaaaacctgcaattattcctgattttatttgaggaagtattatctttctcattgcgtagctaggtgttgctccaagatctaaagcagctttcacaatatcagtaggtagctgggttagttttggaagaacagatagtattacgtaaggaacagaaaatgcaatatgagctataataagcgttgttagtccaaaaggaatctttaaaaatataaacaatgtcattaaggatactgccataactatatctggatttaaaacaggtatattatttacgttaagtaatagttttttaggtagaggtgacattttacttattcctatagcacttattgtgccaaaaatagtagatattatagatgatactatggcaactagtactgtatagtagagagcagttagaattctatcatcttgaagtaaggctttgtaccaagttaaagaaaaatgtccccaatgtgatgaaaatttctctgagttaaaagaaaacaccattagaaaaactataggggcatataaaaatatatatgttagagttaaataaaatctttttaaccatttttctaccatagacgtccaccacctttcaagtcgctcttgctatcaaattttgaaagtacagccatagaaataagtattataaccatcattaaaattgatatagctgaaccaaaataccaatcgccaacagttgtaaattgagattctattaaatttcctatgagcatgaattgtcctccacctaaaagttttgatataacaaaggttgatacggcaggcatgaaaaccattgtaacaccagacataactccaggtatactcaaaggaaagattattcttttaaatataataaaacgattcgctcctaagtcggaagccgcttttaaaacatctctatctattttgataagtactgtatatataggaataatcataaatggaagaaagttataaaccattcctagtattacagcagcatctgtatacaatatatctaaaggtttaaatcctaaaaaagaaagtatagtgcttattattccgtttctaccaagtatagacatccatgcataggttcttaaaaggaagttcatccacattggtattataagaaaaagcataagtatatttcttatttttgtgcttgactttgaaagtatataagctacaggatatcctaaaaagaaacaaatgatagtagatataagtgctagttttattgaattaaaaaatactaacatataagtggaattaaataattttttatagttgtttaaggtgaaagtgctgtcgctgcttgtaaggctgaaatatattactagaaaaattggtacaagtatgaagagtatgctccataagaagtaggggtattgcgaaatggaacgtctatgcttcttcatctattttttcctttctcataatatgtatatcatcaggaagaatatctaagccaatactatctccaactcttacatgctttgtattatggattatccacgtagtattttttacttcaaccttgatttcataatgaacacctctaaaaacagcagaaataacttttccaaagagttttccattttctttggacacaatttttatatcttcaggtcttacaacaacatcaacatcttcattttcattaaatccagtatctacgcaatcaaaagtttcatcatcaaattttaccttgtaatcgtgtagcataactccatttaaaatattacttacacctataaaatttgcaacgaatttatttttaggttcgttgtatatatcttcaggggtacctatttgttgaaccgtacctttgtttaatactacaatagtatcagacatggtaagtgcctcttcttgatcatgagtcacaaagataaaggttattccaagtttttgttgtatgtttttcagttcaagctgcatttcttttctaagttttaaatcaagagcaccaagaggttcatctagaagaagaagctttggtttatttacaagcgcccgtgcaatagctaccctctgctgttgaccaccgcttaaagaatcagttgatcttttttcaaagccttttaagtctaccagagaaagcattttttcaacttcttcccttatttgtttttctggaagcttctttatcctaagaccaaaggctacattttcatatacattcatgtgtgaaaaaagagcatatttttgaaacacagtatttatttgcctcttgtgagggggaacaatatttatactactgtcttcaaatattatgtttccttcatcaggagtttcaaaaccagcaatcatgtttaaggttgttgttttaccgcatccgcttggacctaaaaatgtaagaaattcatttcgtctgacaaataagttcaaatttttaattacataattttcgccatatttctttgaaacgttcttaagttcaataagtatgtctttttccatagttaaatttaacacctctttttataaatgttaaaaggatggtggagtgcttatccaaatgatgctggctgttttttttccagcatttgaaatttgatgattcacgtttggcttaaagtaaaaactttctccgcttttaactttgaattttttatttccaagtttaagatatatagttccttttaaaacatagccaaactcttctccctcatgaggttcatcttcaaggtaggagccattctcgtaaagtgttaacataacaggttccatagaatccttttgagaatttgaaacaagccacttaaggttgtattttaattcttcatcagaggtttcacacatatcatcctttttaaatactattttctcctgattatcctccttgaaaaaatcaggtaaatttgtccctaaagcatcgaggatatcagttaaagttgctattgaaggtgaggttagatttctctctatttgagatatgaagcccttcgatagttcacatcgattagcaagttcttcttgagttaattgcttttcaatcctaagcctttttattttttctccgatatccataaatcacctatgtaaaataattttaataaagtattaataagaaaagagccgtataaaaacttaacttatgcatggttaaatctcattactaatttcatgtataagttaaaatttcatttggtttctcttatagtatatgtaaactgaaagtttatatatactaaactcgacaataaataattatacattaaattttaaataaatcaataattacatgttaagttttaagtaattactgtaatttatagggggcttgtactacttataagtgtaaatgtattgaaaacattttgaattaaaatacgtaaaagtatataattgttaatagtgtgcaagaaatattttagggggaagatatatgaagaagagcataatattaattttcttattgattctaatttgtgcagctgtttttactgcttgccaatctaatttagcaatgttgaataaggaatgtaactatgcagttactggtaaatctaaagggagctttacagctaaatgtggagatgaaattttaataagatataattcaaaagttgaaagtggaaacttaataatagaaataactaataataaagggaaaataattagagtatttaaaaccaatataaaaggaagtgataaaataactgtaaaggaaactggtaagtatgtgctggatgctgcttatagcaaatttaaaggaaaaatttcagtaaatgttcaaagaaaataaaaattactaggatttagaatagacataaatatgagattgttatagaatgtaagtgataaaattaacattatgtggagtaagattgcaagataacgaaagaattgaagaaaaatataaatgataacatttacttcatggaatatatttgaatataaagaatgaaatgtattaaaacgtataatacaatattcttagagaaataagaataactttaactttaaaatcagaaattactggcataattaaattacaaagaggtgtattatatgaaaaagaagaattttgcagctatttgttttacgcttgtatttatgatttttggagcttttttaaacaacgtagtttgtgtacaagctaaaacatcagcgcccgttaaacaaagtaattattacagaaatgattataatgatgctgtaattaatgatttccaaggagttgccgattatatacatgaatatggatatttgccagacaattatataactaaggagaatgccgaagaacttggatggacaccaggtgaaaacttatgggattatgctccgggtaaaagtataggcggagatatatttactaattctgaaggagttcttccaactaaaaggggaagagtatggcatgaatgtgacataaattattttggtggacatagaggtgcagatagactagtatattcaaatgatggacttatttatggaacatcagatcattatgaaacatttacacgttattattaaaaattagggtgatataaatgaaaatagttactattgatggcaaagaatttaaagacaaagataatctccatcgtatattaaaaaaagagcttaaattcccagaatactatggtaaaaatttagatgcactttgggattgtttaacaggagaaactaagatgccattgaaaatagtatggaaaaattttaatgatagtaagggatatcttggacagtatgcagagagaacagcacaagttttattgagagttgaagagtattttaacggcaagtttaaggtcgaaattcaataaccaaaaggtgaaagctatatgattataatgctttcaccttttttagatttaaagtacaagagttgctggagtgtatactcttgttttaagttcagaatctaataaatataatccttttgaatctgagccaaataactcgtattttcttacaaggtcttcagtatttttttcctcttctccttgttccttaacaaaccaatctaaaaattgcattgttctaaagtctttaactgaaaaagcagcttcatatatcttatttattgatgctgttattcccctttcatgttttaatgtagtttcaagaggagttgaaatatctgaaaagttaagtgatggtgcgggaatgtttcctaaggttatatcttcactgtttatttcgacatatttaagaaatagcattgcatgatctttttcttcctgagtttgaatatagaaccagttaccaaaaccatctaagccttttgaaatgaaataattatgtatatcaagataaaaatatgctgaatagaattctttggttacctgatcgtttaataactttaatagattattctctaacattattattacctccagttattttgcgtatttatatagttatagggtatccttagtggtgtgtttttattaaaataattatagataggtaagctttttgtatgcagattaaaagcttatatgtaatataaagttatttatgagaaatttataaacagttaataaattatatataatgtattaataaataagtgttaatataaatgcaggctaatgaataacaagtttatattataaaacagttgaatttcccccgaagattcaactgttttttcgttattatgggtaatattaatttgaattttaatatataaattatatataaagttaaagtgggggtatgaggtgtgcaagatgttacactgttaagtaaaatatcacaaggattgactgaatgctgtagaagaggaaaaatattcaaagtaagtaaaatggctgtagtagttaataaagaaagcatggttaatgaaaacaatctttctgaatatcttaaaagttataacaaagaattaatagatcctcttacggaaataaaaattgaaataggagatttaccggatcaagtagcaattataaaaaacatagaaggggataaagaatagtattatataaattttggaattttctataaatcgaagtagagttgtagaagattcctgtttttttatattaaaacattctccaacatggatttaatttgtggttacagcttaatatgttagagaaacttagctatttttttaggagaattagaagagtgaaaaacaaccgtattaaatcttacttataaaggatttaactacaaaactttaaagtgatgcaaataaataaaaaaggcgcctatacgcctttttttattaaatacctatcataaaatttcatctgtgatatttcaggataattttcaaattctttaggaatcgtgtaaacatctaaagtgtagtcaggtattaatcctgatattaaaaataataaacctattaataagaacatagacatattaaccaactcccttcagttactattatacataaatgcaggaaaaaagtcattactatttaacaaataaatgaaaaaatgcaaaagcaacaattaatgtgacagattagctatcatctagtaagattatctagtaaaacattctattaattcaaataaaatcagtggtttattattaaacttttaattataaacagttttattataattaaaagtttttaatatgaataaaattaagttaaatacatataaatataagtttaggtaaaatataaaaaaggtaagtgattttttatcacttacctcagatcgaaacttcacttggttttgagaccaaattattaatccattttttagatagaagccttggaagaccaacaagtaattttacaaactcctccatgaaaacaaaataataaacaatgcctataggaagtttaaaatatatacctgttaatgcaacaaaaggaacacctacaagccacattccgcccatatcaagcatgaggcaaaatttagtatctcctccgcttcttaaaatccctactacatttgtataattaaatatctttatccaaagaaacattcctatgatatgaaggatttctttagaatacatatgaacctgactatttatgttgtaggcatatagaatagctggcgaactagtataaagtatgattcccataaagattccaataaaaggacttaaaataataaagcgttttgcatacaaaaatgcagttttctcgtctttttgtccaattctatttccaatcattattgcagctgcatttccaaagccgaaaaacactaccattgataacctatctattgttgaagtaatattagttgcagcaataacagccgttcccatatgagcataaacagcagcgtaagctgtaacaccaagaccccacatactctcattaagcataacaggtaccgcaactttgaaaaatctttttacaaaagtagtggataagtctagtagttcatgaagctttgcggctataggaagctttaacttgtaaatagcaagaagcattaagaaaaattcaataaaacgagctattaaggtagcgatagcagaaccatatactccgattccatgaaaggagccaattccatagaccagtgagaagtttaagaatgtatttatagctaatgctgtaccacttactatcataggaatctttacttgacctacagttcttaaaataattgaataggcaaaagaaataccagtaactatatagctaaaacatattattctaagataatttgcacctaaagaaattacgtttttgtcttgagaaaaaaagcctattataatatttggaaaagctaaagcgcctattgtaaaaattccagataagattatggtagtgatcaaacaaataccaagtactctctttatatttttagtatctctttttccccaatattgtgcagtaaaaattgaggctccactagcagtaccaaaaagagctaaatccaaaagaaagaaatattgatttgcgagacctactccagcaatagcagtttctccaagaccgcctataattatattatctactaaattaagtgaagataatataaagttttgaatgattattgggattgcaagcccaaaagcagccttgaaaaatttcttatcgttaaagagttgcaataatttcataaaaaacctccaatataagagatgatctagtttttaattctacttaaattaaaaccctgaccaagtacttcgtgtgtgttgcttattataacgaaagcatttttatccttttcgtaaacaagttttttgaatttatttacttcagtatgttccattactaccattaatactgttttttcttcatcagtataaccaccacagccagataattttgttatacccctatcaagttcttctataataccttgtcttatatcttcagccttgtccgatattacaaaagcaactattgagctcttaaatccaagttgaactaggtcaatgacttttcctattataaataatgataaaattgcatataaggctttttctgcattaaatatgaatccagatgctattatgacaacggcatcgataaaagcttgagagtttccgatagatactcctgtaaatttattaaaaattgaggctataattgaggtaccaccggtagaaccatttcctttgaataccaagcccagtcctattcctgaaagaacacctccatatatagatgctagtaatgcattggaggttattggtggcaggtttttggtaataagtataaataaaggtagaataactgttccaagagcagattttaaggtaaatcttttacctagaaaaaataatcctaagaagaaaatggggatatttcctacccattgagttatagctggttctatatggaataattgttctattaaaagagataaaccaaccataccaccagaggctattttgcttggacttaaaaataaattaaaacctagagcaactattaaactacctacgattatcattaagttctgcattagaaaattcaatttagcattgttttctatactagatatttttttagtcaattaaattcctccttataagaatttttgcttttgtataaattgaattaaacataaatattaataaaaataaatccaaagcacagctatataacttgtaagtaagtttctaaaccgtgtaatttaagaaatgtagaaatatactacaggaaaaccaatatacaatttagaatagataaataattagttggattggctttcctataggtagattacgtccatttttccgcccatttttgaatttcttgcataacgctttctagttctctgcccttttctgtaagttcatattctatgcgtacaggagtttcagcatataccttacgaactacaatgccttgtttttctaattctctgaatctttcagtaagcatacgtgcgcttagatttggaattatatcttgtatatcggaaaatctttttgcaccttttaacaaagaatgaattattaatccagtccacctttttccaagtaattcaaaagcagcttcaaaatgagggcataatttaaatgtatccatattatcatctccataaagtattttatcatatttacttgacaaaagtaagtaggttattataatatagttacataaagtaagttgatatttaaaagttattagatataaaattataaacattgcttgtcaagggatacaaatgggaggtaaataatatgatggattttaagagaattgttgaagaaagacgttctgcaaataattttttggatggaatagaaatacctaaaaatgattttatcgagatatttgatttgcttaagttggcaccctcttgctttaatatacagcatgctaattatattgttgtaacagataaaaataaaaaagaggaattaagaactgcagcatttaatcaatacaagctccatacggcttcagctgcaatacttgttttaggagataaagaggcttataaggatgctgataaattgtattctggaatggttgatttaaagatgatttcaaagtttgactacgagaatattttaaatgatataaaaaacctttatgaaggtaggggagaaagctttaagcatgatgaagccataagaaatgcttctatttcagcaatgatgtttatgcttgctgctaaatataaaggttgggatacatgccctatgataggttttgataatgaaaaaatgcgtaaattatttaatatacctgaaagatatgaaatagcaatattgatatcgatgggaaaggaagatactaaaagtagaagattaagaggatatagaaaacctgtagatgaatttgtgaagtttaatgaattttaattaaggaggagtatgtatgatttcgcctatgtttatatgccatggatctccagaattgatattacaggacaatcagtatactaaatgtctacaaaagcttggaagtgaaattaaaccaagagcaattgtagtattcacggcacactttgaaaaagagacaactactatatgctttagagatgaggcttacaaaactattcatgatttttatggatttaaggatgagctttacgctgttgactatcctgcgattggttccaagggtgtagcgaaggatataagtaatcttcttaataaaagaaatatagataatgtttttgatgagaaaagaggacttgatcatggtacatggagtatacttaagttaatgtttccaaaagcagatgtgccagtagtgcagatttctgtgaatccatatttgccaattgataaacaatataatattggaagggcaattagggaattaagcgataaagatgtactagttattggaagtggtgcaactgttcacaatctaaaaacattaaaatggaataatagtactccagatatttgggcagttgagtttgatgattggattattaataaagttaaaaataaggatcttgaatcattatttaattataggaagctagcaccaaatgcgaaaatagctgttccaagggaagaacacattgtcccattatttatagctcttggaagtggaaatttaaaagaaaatcctgaagtgttatgtagaatttatgaatacggaagcttaagttatatatgtataaaattttaaagaaataattataggttgtgtgtacaaaaatgtaattacacaacctataagtttataaatccaaaccttctttagctatgtctaaaacagcaattttggcatttttattgaacctttcatttaaaataaatccaatgactaaccaaattagaacgatataaggaaaggtgttggttggaaactctggaataggataaatattggcatacaatacatataaaagagcagctatagatagtattggaataaaaatatttaaattttttatttcttttgttcttttaaaaaatactactgctccaatacttgtaaataaatatgatactattatggcaagggaaccaatagtagctagataattaaaagcctcaattccatccttcttaaataatataagttgaagaaacattgctacaatggtaattaatattattccaatgtaaggtgtacaatgttttttgtggattatagataactttttagatataataccatctttactcattgcaaacagtattctagaaccagcacatgctgaaccaagtgagcaagaaaagcatgaaagagaagctgaaaaaagtaaaaatattccgaaagttctggatatatatttagtagataaatcagttaaaggcaaagaggaggttgatagagctttaagtccttttgcgtcaacaccgaagcctataacttgactatagcttgacagtagataaaatataccagtgacaaatacagcacttcctatggcaagaggtataaatttttttggattttttgtttcttctccaagactagaagcgctttcaaagcctatgaaagataaaaatgctaatacagaagtgcttgctagagttgagaaactgtttttgtttgttttaaacggaatagggcttaggcctttagtagagccaactttaaataagataacaatggataaaataaaaattaagagtatagaaatgccctccatagcaagcataattcttgtgcttattttagcatcaattataccaagaattactatacctaaggagaaaaacatagaaagtggaagccaagctatttgtataccaaaatagtttagaaatttactgaaaaatgctcctaattcagcacagcagcctgcagctaacattacatatgcaagtagaagagcccaacctgttaaaaaaccaaatttttcacccaaggttttttcagtaaaggtataaagagaaccagaactagaaaaataatgattaaatttaataactgaataggatacaagacctactatgaccattgagatgaaaaatataagaggttcagagaaagaagcggataatgacatgagagagacgttaatggacattgcagcggtgggagcaataattgcaacagataaagctatggtttcaattatacttaagttatctttttttaaatttgagtttgccattttgaatacctcctctaaaaaattaaagattatcattaatatttgatataatatcaatataatatttattactttaacaaattaataaaaatgttatatataatttaacatattattaagaaatgtaatatatccaaaatagacaaaaataaaaataatatttggtttaattaaataaattaaaagcgtaaatgttaaaaatgacaataaataaagagggaatatacaaccctctattatttgttatataaattttttaattgtatttgatgcctgaaaagttgcctaaaaatttcatctttatttttaggcagtatatttacataggcaaaatcatagtagctaaaatctccaacattaaaattttgaagtatcttaccggatatatctatgatggtatcgtcttcaaaaaatattttaagatttataattttatctttttcataatgttttatagaattaataggaacataaaacataagagtatttcctccaattttacatatctcaacatcgtgagtattatacgtatcaaattgaagttctgcctttagatcccaaaatatattaaaggaatcttggtaaactacatatttaaaatctgataaaagtatttcattttcgctaatatattctatttttactttgtactcaataatctcatttgtactttcgcttatataaatattactcgccagtatgtcagatttatcaatattttttataaaattaaatttatctgttttaaataaatagcctattttatattttataagggaaccctctattgaataaatttctttatttgtagttatagtaagtgtactccagtttatagcgtttaaatgtgtgttttgtgatggtttaagacgaccagttaatatatctagcatactgtcagtaacctttggatcataaataatacccttatattttctcaattcagaaattacataatttatgtctttagattttttataacttctaggagatagcatagcgtctacagaatctgcaacttttataattctgcttattagtggaatatcttctccttttagattatcaggatagcctgtaccatcatagctttcgtgatggtgtctaactattttggctatatcatctaattcagttatatttttaataagattagaactgtatatactgtggctttttataacattaaattctttttctgttaaaggaccttttttatttagtattgcttcggaaatataaattttgcctatatcgtgtagaattcctgaaaggtatgtcatccttataagttcatctgataagtccatacgtgttgctatttcttttgaaaaattggcaacatgatatgggtgaagcagcataaaaaaatccttttcacgtgttatttcagaaaatgtgtttataatactaaaaacaaaacgtctcttttcgcttattagatatattattttgtacaatctgttaatactatcaataacattttttactctcaatttttctagagccataagatcaagcttttcatcagtttttgttatactgcataaatagactgcgccatttagggtttcatcatctcctagtagaggtatatatatttcggaatttgcttcagggataagtgtggcgtatgaagagtctttgctatataatagtacttgtttcttgtccaaaaataaatttatagcgtaatctttaagagaagaaatttctctaataatatattttttcgattttttatacttatttttaaattgtatgaacattctttctgaataaagcatttttttatgatctgaaaaagttattattcctataatttgaaagttcattaaggtacataatttttttagacatttatcaatatcactgcaagcatctaggttacttgatttatagtcataaaaggtaaccaaatttatcactccttactgtatgaaggtggtaattgttattttagtatgataataattaacataaatacaaaaatatgttaattatatgttaccataaaattaagattatatatagtacgtaaaaaaatattttctgaggtgtattatgaatagaacaataggattgttggcgcatgttgatgcgggtaagactaccttagcagaacaaattttatatcataccaatagtatacgaaaaagaggaagagttgatcacaaggactcttttcttgataatagcttggttgaaaaggaaagaggaataacagttttttctgagcaggctatttttgaatttaaaggttcaacttattttttagttgataccccaggacacatagatttttctcctgaaatggagagagccattgagattatggattatgctgtattaataataagtggagtagacggtgttcaaagtcaaactgaaaacatatggagacttcttaggaaatataatgttcccaccatattttttataaataaaatggatagattaaatgcaagtaaagagaaagtaatcaaagaaatagtagaaaatctaacgtcaaaagttttccttattgaaggaaatgaaatgaacgaaaacacaattgaatttattgcagaaaataacgatgatttatgcgagatttatttaagttctggctatgaagagaatttatggtttaattcaatgaaggaaatgataaagaaaaatataatatttccatgttttacaggttcagcactagaagatataggaatagaatattttttacaaaaaatgaatttgataacctatactgaatataatgagacagaagaatttttgggtttagtatataagataagatatgatgataacaaaaataagatagtgtatataaaggcgcttaaaggtagtgtgaaggtaaaggatgaggttagagttgaaaattccagtgagaaaattgaagacattagattttataatgggaataagtacaagacagaacataaggcggctgcaggtgagctatttgcagtagtaggaattaaaaatgttaggtcaggtgactttgttggctctttttcagataagatcaaatataatatgattccaactttaaaatcaaaggttgtatttgatgaaggtattaatgcgaatcaagttttagaatattttaaaattatagaagaggaggaaccctctttaaatatattatggaatgaaaagcttagaagccttgaaatacatgttatgggaaaaatagagttagaaatcttgaaagctattatgaaggatagatttaatttagaagtggatttcggtccatgtgaggttttgtacaaagagaccatagctaaaaagactaatggttatggccattttgaacctttaaggcattatgccgaggtatatcttaaattagagccagcacctttaaatagcggtataacttttattagtgaatgcaaaactgaaagtcttacacttggtgagcaaaatctcataaaaacacatatatttgagagggaacatcatggcattctaacagggtctgttgttacagatataaaagtagtattaatagatggaagacatcatgttaaacatactagcggcggagattttagggaggcaaccttaagggctttaagacaaggccttgaaagtactgaaaatgtgcttttagaaccattttatagttttaaaattgaagtgaatagtgattcaatgggaagagttatggcagacattaataagatgagcggtgaatttaatcctccatatattagagagaataaatgtgttatagaggggagaggacctgttgtggagtttatggattatccagcttctttgtcttcttttacgaagggaagagggagaattagtcttaattttgatggatatgatgtatgtcataacagagaagaggtcattcataatataaattataataaaaataaagacatagagtatacttcaacatctatattctgctcaaagggtcaagcttataaggttgagggaagtagagttgttgaatttatgcattgtttacataagtaaagttaaataataattatagagaggaattagtataatgagagcatttatatttgatatggatggagtaataattaatagtcaacctattcattatgaagtagatactatgatatttaaaaaattagggattgttttaaagaaagaagaaatggaagggtttgcaggaatgacaaatccagaaatactaagagttttaaaggaaaaatttaagtttgaggaaaatattgatgatgtattaaaggaacagataagaattaaaacaaatttattaaaacaacgcaaaattaaaccaatagaaggtataatagaattagtggacaaacttaaggataaaaacatattgatagctgtagcttcttcttcacctagaaaatttattgaggcagtacttgagactttcggtataatagaaagatttgataaaatcatttgtggtgaagaggttccaaagggaaaacctgaaccagatatttatatagaggcagctagacagctaggagtaaatatagaagaatgtgtagttttagaagattcaactcatggaatagcagcggcaaaggctgcggggatgaaatgtataggctttcgaaaccctgactcaggaagtcaagtacattcaaaagcagatattgtagtaaattctataagagaaatagatattgaagctatttaaataataaattcccatataaaaggtgttttaatttaatattaaagcaccttttatttaatatattatattttggataacaaaaacataattgacaaaaaaaccttgataatatagactgtttagtatataaaagcggttgtctaacttagtagataaaaaataatgtacaaaaaggatgtgatataatggcggctactataagggatgttgcaaaacttgcaaatgtttcgccttcaacggtatctagggttctaaatgacagtaataaaataagttgtgaaaccaaggagagagtgataaaggctataaaaaaattggactatcatgccaatgccatagcaagaagtttggcaaataactcaacaaaaattcttgggcttatagtaccaaatgaggctaagaacctatttagaaatccgttctttataaaagcaatgagagggataagtttatgtgcacatgaaaacgagtactatataatgtatgatttcggaagcagtgaaaaggaagaggtctctcttataaaaaaatatgttcagagtaagcttgttgatggtattatacttttgacagtaagaaaaaatgataagtgtatagactttttaaagcggcttaagtatccatttgttgttattggaagacctgaagaatcaaaaggagttatgtgggttgataatgacaattttaaggctatgtatgatcttgttgatggtttaattaaaagaggtgctgaatctatagcttttattggtgccgctaaggaaatgaacatgtcaagggatagacttgatggatataaaagagcattgcttgcccatggaagagaagtagatgaggaaattatagttgagcaaaagagctttacagaagaagaaggttatacggctatgaagaagatattagaggtcaaaactccatctttggtagtaactacagatgatttattagcttttggtgttctaaaacttctaagggagataggtgaagaaagtatatcagttgtaggatttaacaatattccgttaggtgaatatcaaaaccctccacttgcatctgttgatattaatgcagagaagcttggttaccatgctgctaagctgcttatcgatagtgtaaataaagaaattgaaaaaaatcattttataatagatacttttcttaaagaaagagaatccataaaattatcaaaataattttatgggaaagaaattctgagtataaattagaggaaacttataaatgttttctctaatttattttatatatatttttgaataatattcctcaagcattctttttactgaaaagtaatctttagttgataaaatactatttttcatcatggaaatccattttttcctttcaagatagaaggtaggaataactttattcataagcacttcatataatgcatttgcatcatgcttatctataaaataaatatcatcagattgcaaaccatccccaaattgccagccatttattccatctctacatgcttctggccaccaaccatctagtgtacttaaatttagtacgccattcatagctgccttcattccagaagtgccgctagcctctagtggtcgtctaggattgttaagccaaacatctgatccttgagtgagaagttttcctatagtcatgtcgtaattttcaaggaaaacaactgaagaaggatattgttttgaaaaattaactagattctttattatgtctttgccagtatcatcaagaggatgagctttacctgaaaaaactatttgaattttaccatccttaagcagaggagagatgattttcatgtctgaaaatattagattgcttcttttataaggagcagcacgcctcgaaaatcctattaaaagagaattttcgttaagttctatctcatttctttctttaacaaaggagattagttttcttttgttttttatatgattagtccataagttgtttgaattagagtcttcagcagctttaagcatatcttcgtctacccaagttggaatatgaattgcatttgttatgcttattatttttgatttatttttaatgtttttccacatcttatttgcagtttctccatgtaatttggaaactgcatttgatattctcgaaagtcttagggctccaacagtcatgttaaaagggcagccacctaaagaaatgagctgttctattgtaaaaccattgtttgccccaatacttatcattcttgaaattgagtgagattcgtttccttctatgatgggggtatgagttgtaaaaactatttcttcttttgattttttcactgcctcatcaaatggaatacctgtattcattttttcacgtactaattcaaaacctgcgaagagtgcgtgaccttcattaaagtgatatacgtctacattaatatcaagtgcccttagtgcccttactccacctattcctaaaacaatttcttgagcaagccttgaatcttcaaaaccaccgtaaagttggtttgtaatccacctattatcgttttctggtaaatcagtatctaggagatatagaggtgctagcttaaacttatctaaaagccatattttacaagtgacatctttttcatatatttttacttttacctttagtttggtatcctttaaaaaatcatatttatagttgtgataagtatcatacacattactattttcatcaataagctgatcagtatagccttgcttccactttattccaataccgattataggataattatagtctttagaaccttttagataatctcctgcaagaataccgagacctccggcataggtttttatggaagcatcaatggcatattccatagaaaagtaagcaattcttggtaagggggatttgctccacatcttaacacatcctttttaacatatactttaatagtatagttgagatgtttataatattattacatgtaaaaatcaatttgtttccctatacttaaataatatattataatagcagtatattaaacataggggagtgagttttagtgaagaacataaggttagtaaaaaaggaagacagtgaagaaattttaaatatatataaaccatttatacaaaatacagctataacctttgattacgatattccgagtattcagaagtttactgagaaagtttctaatatatctaataagtatgcatatttagtatgtgagattgatgagaaagtagctggatatgcatatgcatcaagttttaatgaaagagctgcatatgattgggcagtggatttatcaatatatgtggatgataagtatcaagggaaggggataggtaaagctctttactataccttaatagaaacgttaaaaattcaaggttattgtaatatgtatgctcttgtgacctcctcaaatacaagaagtaaaaattttcatgaatattttgattttaagctttcaggaacataccatagttccggatacaaatttgaaaagtggcatgatgtggatgtgtttgaaaaaattatagaagataatgcaaaaaacccacatgagattatagcaataaataaaataagagagacaaaagagtttgcaaacataatagataatggagtcttaatgattaagtaaagttttagtacataaaagttgtagctagcatatatatttttctacattaataatatttaaagatagaattttttagagggtatatgtatgtattatatttgtccgtattttttagataaaaatggacatagagttcaaaaaactatggttggtaaagtagctttggatgaacagaagcttacgcctcagaagttcagtataacttatccattaataataaacttacaggatgaaaaagtgaaaacaaaggtaaatgaggatatagtaaatcaagtaagtgagctttttaaaaatcaagtacttcttacggaaaagattgatttaagtgaagtatttggagcatatgagattggagttaatagaaattatatcttaagtattttatttagcatttacacttatatgaatagggcagctcacggtcttacagtatattcttctataacagtaaacacaagaacaggaaaggtgtatagttttagtgatttgttcaatcctaaaatgaattacttaggtgagcttactacaattgtaaagaagtatattaaagataataatattcagcttatagaggattataaaggtgttacaaatgatcaggagttttatttaacaaatgataaacttgtactttattatcaggtttatgcctatacaccatattactatggattatttaggattcctataccttacacagaaataaagaatcttttaggaccaatgagtcctataaataatcttatataatatataaagggtcatgtaaagatgactctttttatatttggttaaaattttgaagataatattgtataattagagtaaggatttactgttaaggagatttttatggaacaaaatataaatataatcgtagtagaagatgataatgatataaataatatgcttaaaataatgcttgagaggaaaggctataatgttgtgcaagcctattcaggaactgaggctcttcttcatgtaaagactcaggagtttcagttgatgcttctagatttaatgcttccaggaataagcggagatgagttgcttcaaaaagtacgtggaataagtgcaatgccggttattgttatttcagcgaaactttcaaaggatacaaaggttagaatgcttaagattggtgcagatgattatattacaaagccttttgatatggatgatgttgatgcgagaatatattcgaatttaagaagatatattaaatttggaaaagatgaaagttttaatagtaaaatagtctttaaagatatgatactggatagtgtggctatggaggttattgtaaatggacagagaatgtcgcttactaatagagaatttaagattcttgaagtcttactgttaaataaaaggaaggtattctcgaaagctaatttatttgaaagtgtttgggaagatacctatatgggagatgataatacccttaatgtacatataagcaatttaaggaataagcttttaaaggcaaattctaaggaagaatacatagaaacagtatggggaatggggtatagattaaaaatttaagaatttcttaagaattgctttaacttctcttatgttatgtgttttattattaaagcataggagggatttttatgaaagatgcagtactgaagacagttaatttatcaaaaaggtataaagatgtaactgtgttagataatgtcaatataaccattaataaaggtgatatatatggattcattggacaaaatggtgcagggaaaaccacattaatgaaactaatatcaggattaataattaaagatagtggaaccattgagctttttggtgaaaatgacactaggaatatagagaatatgagaaaaaggatggggtgtcttatagaaacaccagcactttatgattactctagtgtatacgataacctagaaatcaatagaattcaaaagggcataccaggaagagagtctatagataaagttcttaagatggttggactttataatgaaaggaaaaagcaagttagaaaactttctatgggaatgaaacaaaagcttggattagccatggctttgataggagatccagagtttttaattttagatgagcctattaatggacttgatccaatgagtataattgaaatacgaaagcttctcaataagttaaataaagagtttgatgttactattttaatatcaagtcacatattaagtgaactataccaatttgcaaattcttatggaataattcataatggacggttagttgaacaaattacttcaagagagttagaggaaaggtgtcaaaagtttttgtacataagaactgataacgctgagagggctgtttttaccatagaaagaatattaaaaactcaaaattacgaggttatgcatgataatgctataaaattatatgaatatctagatgagcctagtaaggtagcttctgttcttttaaataatggaagtttagttgacgaaattgctttaaaaggagataaccttgaggattatttctcaaagctagtttggaggaataaaaatgtttaatcttttaaaagttgagttttataaattgaaacgttctaaagttttttatttgtttattgttcttatgattatgcagagcatgtttgtacttattcctattaaagaaaactatcttttgaataaaacaggacaagatatgttcctgcagtcctttcctttacaggaatttatatttaatacacttattattggcgcatttggatattttatagggaaagaatttcactcaggatacataaagaatttgattgtatcaggccataaaagaataaatattgtactttctaaagcaattgtattttgtattggagtagctattataagttttattttcccaatatgcacttttgttataaatagtataaggaacggttatggcgaaaaatacagcgtcgaatacatgtttgaagtttcggttattatgttatttgtgtatttagctataggaagtattgtaacaatgatttcttttattacaaagaacattgcaataacaatagccttattttatctaatagatataataaatagatttggcacagcaatgtctcttaggaatagcaccgttaaatatttttactataaaacagtttttgctataccatctatttgtatattagataaaataactgtatttactgcaggaaaaatgttatttatatgtcttatgactacagctatttgtactgcattaagtattgaagcattaaaaaaagcagatatgaaatagattatgaacggagggcaagtagatgatttttttactatttcttcttataattttttcaacagggttgcttgtccgtgattatttagtcagtaaagagttaaaggtaatgacagagaagcttgaacatattaacagagataattgtgatgaaaagctaaaaataagcttattaaataaaaaaattgaaaagttgtctaagagtataaatgaaacgctttatgcaaaatcaaattgcgaagcagaaaagaaaaaatcggaaaatagacttagacaagctatatcagatatgtcacatgatcttaggacaccacttacggcgataaagggatatattaagtttttaaaagaggataatttagaaaactatcaaaaaagagattacatagaagttatagaaaaaagagcagaaactcttgaggtgctattaaatgatttctatagattgtcattaattgattcgcctaattttaagctaaatatagaaagaattaatttatctaggacactagaagaagtaatgttttcaagatatgttgattttaaaagcagtggtatagaacctaaaattagtatatgcgagaatctttacatagctgcagatcaaagtgctttagaaaggataattgataatctaattacaaattcagtaaggtatgctaaaagctatatagaattagagctgaagataaaggaggatactgttattctaaaaattagcaataatgcaatgaatttagagggatgtactaatgaaaatatttttgatagattttatatagcggacaaaaccaggtcgggaaatggtacaggcctaggcttatctattgctaaagaacttacagaaaaaatgggtggacaaataaatgcaaatatattgaatgataaaattgatgtttgcgtaaaatttatgctgctcaaaagttagctaaaaaaactctcaaagttatattattttgagagctttttttagtacattcaaaacatttatatgttattattataatattataaatatcggaggaaatatggataataagaaattgtttgtatttataaagtactttacactagtttttatgattgttggaattatttttggagggaaggaatttaatgcacagaatattacattaatgcttatacttataataaatcatcagttaagaaccttctctttaaataagtatattcataaaattatatcttttattcttgagatagttcttgttgtcatatgtaatttttggatttcaggatatctatttacatatttaatattgctagctatagatgctaatgtaatgtttaagaaatttttagcttctacctttaatgttgtgataattttaattggtgtttatttttctttcaattatagtttgaactataagataatgaatcttggtgtttcaattattattatagctgtattttatttcaataaatatgaaaatgagaagaaaattgaagctcaagatctttatgacagattaagaatatcagaagaaaagcttaaaaaggctaatagggacttagagatgtatgcttcttctgttgaagagttaacgcttttaagagagcgaaatagaatttccagagaaatacatgatagtgtaggacattcattatctacaatggttattcagcttggagccattgagaagattataaggaaggctccagagaaggcagagcttcttacaaaaaacttaagaaagtttactcaaaaaagtcttgatgaagttagagcagctgtaagagcaataaaacctaaggaattcgaagaatatgaggggatattaagtattgaggaacttataagtaatttcaaaaagatggccaacatagatgtcagattagcttttacaaaagaaaaatggtcactaaattctgatcaatcatttgtactatataggatagttcaggagttcttgtctaatagtgcaaggcatggaagggcatctagggttgatgtaataatggcatttagtgaaaaaaatttacttgttacattaaaagataatggacaaggatgccagagtattattgaaggagtaggtatgaaaagtatgagagaaagggtaaaggagcttggaggatattttgaatataagactgcaccttatgaaggatttactgtaaaaatagagctagctaaaagagaaaaacttaaagtatattctggaggcgaaaataatggataatattaaggtcgtaattgtagatgatgagaaattagtagttgatggattaaagataatacttgaaacctatgaagatataaaagttgttggaactgctaagaatggagaagaggcacttagggtttgtagacaaagtagtcctgatgttgttttaatggatataaggatgcctaaatgtgatggagttttgggtactaagcttataaagaaggaatttaaggatataaagattttgatcctaacaacttttaatgatgttaaatatattcatgaagcacttaagtatggggcatcaggatatatactaaaagatagtgattatgagcttatttatgaaggcataaaagcagcttttaaaggaaatgtagtaattaatccagaggttgcatcaaaaatattaagtgaaaatggagaatacaataaagagcaagcattagaagaggttaagactaaatatgatttgagtgacaaggaaataaatatagtaagagaaattgctagtggattatctaataaggagatagcagagaaactttttctttctgaaggaaccataaagaataatataagcattatattttctaaattgaatttaagggatagaacacaggtaacaatatttgcctttaaaaataacatagtgacttaagtaacttcaaaaaaataactagtagttataaaatgtacttaaaaataaaggttctataaaaggaagtgattttttgaataatatggttgaggtaaaaaatgttactaaaagatttaatgataaattagttcttgataatatctcctttgaggtgaaaaagggagatatttttggttttataggtcctaatggagcaggaaaatcaacacttataaatataatgacaggacttttaagtccaaacagtggtgatattgagcttggaggtcattctattttgaaggagcctgtggaagcaaaaagactaataggacttgtaccgcaacaattagccttaatggaggatttttcggcttatgataatcttaggtattttggttctttttatggtatgtatggaaaaaaacttagagaaagaatacatgaagtgcttgaggttacaggattattatatagaaaaaatgagaaggttaaaaagttttccggaggaatgaagagaagacttaatcttgcagtggctataatacataatcctaagattcttataatggatgagcctacagttggagtagatccacagtcgagaaactgcatttttgaatatataaagaaggttaataaagaagaaaatacaacggttatttatacatcgcattatatggaagaagtcgagttaatctgtaaaaatatatttatattagattccggaaaagaagtagcaagaggttctaagactgaaataaaagcactttcaaatatgaatggaacaatacaacttaaagttgatactttcgatgaaaaatttcttttgaggttaaaagaaatttcaggtgtgagaaatgtatttgtggaggatggtacaataaaaattttaatagatgaatggaaatttcagattaggaatttactagaggcagcagtaaaagagaatatagaaataattgattttaacaaaagcgaagtttcattagaagaagtatttctttctcttacagggaaaaagttaagggattaggtgaaataaatgagagcaaggattatcagcacactaaccatgaagggactatttgtaggatggaagcaaattgttttattgtatgctatttttccactttccatatgttttgttatgagttatttttctaaaggagtttataaagtagaagaaaacaaagttggtataactatagtggataaggataatagtaaagtatcacatgattttaaggatatatttaatagaaaagacatgaggagattttttaagttatctaaaaagggtgattatagtataacattaaaaaagggaaaaaataaaaattcactttatgtagtagtagatgaaaaaaaacaggtttcagaacataacaaagagcttataaaaagtgttattaaaaattataacgaagaggtaaaaagtaaagatatctttaatatcgaaatcattcaaactaagtctgtaaacaatgaaaagtccatatcctcttatgaatcggaagcagcaactattataacgtatataatgataataatgattatgtcttgttctaaagctcattacttggaaaaagaaaacggtatgtttaaaagaatgatgtccatgccattaaccaaaattaatatatttaattactatattttaatatattttgtatatggattttgtttaggtatgctatatatagctgcttttatgatagctaaatttgcattttttaatattaactttataaatttaattgtattactaataggacaaagcttaatagtagcttcagcgtcaggtttttttattgttttcttgaaaaaaaattcagctaatgtgattcttactacattacttttgattgagacatgtctaggtggcggatttattcctaaagttaaagcaaatacagtttttataggttttatgaagtttgaacctttgaaatttgtctcggaggcttacaaaaatataattacttacaattctttaggaaatattgagaaaaatttaattattatggttgtggtttcttttgtgctttatataatatctttagctaaagttaaggtatcttgggaggaataagtggtgaacttttttgttatagtattagctaattgtagaagatatctaaagaattttaggtatacagcttcaatgattgttgtacctatattattaacgggatttgttactttctttaatttgggtaattttggtacagatgctgatgataaaatagcaatagtaaatttagataagggaagatgtggaagtgaattagttaaatatttaaaggttaaagatgtatttaataaaaaagatgtggcaattaaggagcttaagaataataattattcaggggtatatgaaattgaaaaggactttacagtaaatataaacaatggtagagtgccaaaaataatttcatataaaacggatgatgtaagttataatgaggcttttgaaaatgaaatgaagagtaagataagtttgatggtcaaaggtacaggtaatgagggaaaaagtaatctgattttaaaatatagagaatatagaggctctttattagatagtacaggtttgacatttttgattatatactgcatgatgttattttctatgaattttagtatggatttaattaaattaaggaaagatagagtacttaagaggctttcggttactaagcacaaaacatatattatagtatgggcaatgtattttgcaatgtttattactcaaactattttatattcaatttcattcttactaagtgctgtaatgtgtggatataagattcaaaatatgggggttaccgttttaaatatagcacttagtagtattatatgcataggtatagttatagtaggttcaagaatattaaaaaatgacaaagtagcttctacaggatcatcaattgtatgtttattaatggtatacataaatattgtgggggggaatgctgcaaactctaatttaagtaagtttaggaaactgactcccttttactggataatggatagtgtggaaaaagctaaagtatttccaaattcaattatagttttactcatagctttagtactatttacagcaggaggatttggatataataacttttctgaaaatgagtaaaaataagttgctgcattattataaaaaaggagaacttaatgcagcagcttatttttatgaatttctaatatatttttcagccataagtgaagctatagagccgtcattcactgcggtagttagctgacgtatttctttttctctaacatcgccagcggcaaaaacaccctttatatttgtttctagattttcatttgtttttatgtgacctagctctgttaaatctataaaatctttgaaaagctctgtttttggcatagttcctatataaacaaatattgcatctgcttttaaagagcttttttcacctgtctttgaattttctaaaacaatattctctatagagttttcaccttcaacatgctttatttgagtattcagcaaaagttttacattgttatgcttaaacaattcatcctggcttctcatttctgctcttagtttttctgaacgatgaacaacagtaagatttttagcatatttagttaggaatatagctgcatctattgcggaatttcctcctcctactaccacaatatctttaccgtcatacattgcaccatcacaaagctcacagtaatgaattccttttccacgaagtttcttttcttctggaactggtagaggtctacttttggaaccagttgctattattactgattttggtttatatatagtatcactagtttctattatcttttcagtatcagtaagtttaacagaggttatattcccaaattcatctattacggcgccagctttttcagcatgttcctgcattttatctgcaagatcagcaccagaaatcgaatcaaatcctggaaaattttctattgaaggtgtttctcgtatttgacctccaactagttcattttcaagaattatgaaatcaagttttgctctagaagagtatatgcctgcagtaagaccagcaggaccagcaccaattataacaagatctaaaattttttctttcttcatatatatcaatcctcgccattttaaatataatcaatagtaattgtttattaatatttcttattgaataatataacatttttatggaattaaagcaagttacatatacaatatataattatagtatttgcagtgttaaataatatatttatatattgaaaatataatctaggattatttctgcatttatataaaagtgttactatagcagagattcaatgttggcattttattacattatacataatttaaaaaagataagaacggtttatagaaacttacaatttttttgtttatactataattattaaagaaatttaacaatataaataattacaggttataaagaaaaaattaatttagaaactttatatcaataggaggaacaaatgaaatttaaaaagggaattataattatatttacttttttaattattggaatgctatctgcttgtgataataagaagagttcaatgctgcaattaaatttaaaaaaaggggacaagtataggctgcactgtataaatgattcaaaatttagtattaaagttattcaaaaggatagtagtgttgaggataaagaagatatgtatatagatatggatgtagatagcgttgataaggatcagaatgtgactttttcttataaatataattctataaactcacattttacaacatcaaaaggaaccattgattacaattctaaaaatggagataatggtccagtggataaaatatataagaatataatggcaaaaaagtacacagttaagttgaataaaaatggtaaggttttaagtattcatggtgctggtagtttggtagatgctgtggataatgatgtttctttagaccaaaacatgaagaatgttttaagagataatttggaagataattttaaagatgagtctatgaaggtttacatagaggatgctatgaattatacaaatgcaagcagtgtaaaaaaaggtgatagttggcaaagaaagttaaaaactaataaagaatttagtatggatattactagtaaatacacattaaagaaagaacatgaaaaatctttagatatagaagaaaatgataacattgtggctaatgataaaggtaagcaaattgattttggtggaacaaaagctaaggttgatttaaatggaaaggcaaatggaaatattaatgtagataaaaaaacaggattaattaataggggagaagttaaatatgatgtgaatggagctgttacgtgccttaaaaacgaagatataggtattataaatgatataacgtcccctgtgagttttactcaggatataatttatgaaatagtaccacgataggtactatttcataaattattatttagctcgttgaatatgttctctacgccagtaccccaatttgggtcctcggcgtattttttatttatccaatggaaagggtcagtttctttaggtaaatcatcgcataggtttattatagtctttgcagctattcttgttgaatcttctatgcttgtattatattccttccaactgtgatatacgttaaaagggttattagctattttttttgcattaggtgtatctactggcacaaaaccttgttcttgaccacttattgcaaatagaacaagagggtttagattattttttttagcaacctctataatcttagagaagtatggttcagaagctaatagtgagtgcctttgggttaaatattttctaagagcagtagtatttatatctctatatttaaattgtagaggaagttttggggaagtggtattaaaatatttattatgtgtagctgactttattgcagtcaactttgattttgatgaagatgaagtaaaagataaaaaacttccgtatcgtaatgaatatactgatataattataactataattaatggaatacaaaaaactagaggtttaatattaatcccatcattgcaaggagttttaattggagtttcaattttatttgtagtttgaaaatctaaattgaaggctgtctcaagttctgattttgagatttctttttttatatggtgattaagccagtttaaaatactatcagaataatcgttggaattatctgtgagagaaagataattgtttagtatatcaatcagttttatggaggattgattatttgaggatattagagtctttaataaatggcttttaaggatatcataacagtcacctttaagtccttttatgtttttatcaagaatttgatggactgctttggatagaatctttgatttttcagcacttgaaaaattagcatactttttgtgaatatagttttttaaagttactatatccttttttgaaagtacttctatattttcaagttcatttactaatgactccataatataagaaactccaatctttaatcaattaatttaatattcttcataaaatctaaaaatcctttttattgcatttgaatacgttttaacaatattaataataacaattattgtattaaaggtgtcaaattacaagtgaaaattaaatgtgaatgtgtaaataaatatgttataatcgttaagtaagggatataatagttaaaactaacttatttccctatataaaaaactaaatttctcgtatacaccggtaatatggtccggaagtttctacctgctgccataaatagcagactacggggtgttattgataatataataatattttatctatatacctcattaatacggaaattaaaatattgactatgtatgaaaatttagcaagcttttgcaatttgaagtatacattagttgtttgtttccataaattatgaggttttttatacaaaaaatataggttaagcaataattgtagtctattaaaattatacttgtgtctgatattttagtatttttaggtagaggtttggattttggtgtgagaaattagatatggacgtataaggatgaaaatctgaaaataattataaacaaaagtatttattacaatgattttgtctataattaatatatcctagtatgttttcttatctagtgtaggacaatactaaaataggagagaactaagaatggaagaaaagattaaaaaagagacacaaattgaattaagttatggagttgaagataaaccagaattactttcgagaattttactcgccttccagcatatatttgctgcatttggtggtattattgtagttccaataatagtagcatcatcgttaaagcttgatgcaaaaacatctactgcacttttaagtgctgctattttaatggctggtgttgcaacacttatacaatctaagggtgtatattctgttggtgcaagagttgcttgtattatgggaactgatattacttttgttgcgccagcagcagttgttggaaagaaatttggtcttgctggaatttttggagctacaatactcggagcagttattgttgttattttaagcttttttataaaatacataatgaagttttttcctccaattgtgacggggatagtagtatgccttattgggcttacgctgttaccagtatcaatagattgggcggcaggtggatcaggaactaaaaactacggatcgcttcaaaatatcagtattgctttaatagtaatggttattactttacttataaatcattatggcagaggattagttagtagtgcttcaattttaataggtatggtagtaggatatattatatgcataccactgggaatggtgaatttttctactatttcaaatcttaaaattattagtattcctagtatatttcaatatggtgtgaaatttaatattagtgcactattgccttttatacctgcttattttgtttctgtaataagtacagtaggaaatcttagagctataaatgaaatatcaggtattaaggatgacagtaaaatttcaaagggagtgctttctgatggtattggaagcatacttgcagggatgtttggggcaatgcctaatacttcctttagtcaaaatgtaggtctaatacctcttactaaagttgcaagtcgatatgttacactagtagcaggaataattttgatggtgttaggtttagttccaaagttttctggaattataaatattatgccacaacctgtattaggtggtgttggaatagttatgtttggaacagttgcagcggcaggaatacaaacactaagccatgtgaatttaaataatagaaatatacttataatagctacttcgatagggcttggtttaggagttacatttagaccagagatattgtctagtttacctgaaagcttgaagatgattttttcttcaggaatatctacaggaactatagcagcgcttgtattgaatttaatactaaaggaaaaaaagtaaggagtgtaattttcatggaacaattatgtaaaagaatattagaagaaggtaaggctctgaatgaatatgtactaaaggttgattcttttctaaatcataatgttgacccaaagttaatgtatgaaattggaacgtattttaaagaatatttttctgcaagaggtataacaaaaatatttactattgagagttctggaatagcaccagctgttatgacagcacttcaaatggatatacctatggttatattaaaaaagcaaaagccaaataccttgacggaagatgtataccaaactacagtacactcatttactaagggatcagactatgagcttacgctgcttaaaaagtatatatcggacaaggataaaatactaatcattgatgattttttagcaaatggagaggcatcattaggagctgtacgtttagttgaaaccgcaggagcggaagtttcaggtataggtattgtaattgaaaagtctttccaaaaaggaagaaagtgtcttgaggaaaagggatacgatatttactcacttgctagaataaaaaagcttggaaaagacttaatagaatttctttaattaaaaggttaaatttaaattctttctaaaagtgcaatttacatattgcactttttttgtttttatgaatattatgccataggagagtgattattatgacaaatattgaattaataacatggtcaggaattcttggaatattagcaggagtagttatagtaatgcttgttatatttcctatattaaaaaaaagaggagtaaatatagagaatatgcttgatcaaactaaaaaggctgtggattcttcgggagaaattttaaatgttataaaaactacaatgccaaataacaatgtagttaatattctacaaatagttcaaaaatgggcgcaaatagcagttggtgatgcagaacaattgtatcatgcaggtaatataagtaaggaagatagggcaaaggttgcagagagtgttgtcttgaatgttttaaaagagcttaatatagaagttgatgaaagcaaaaagcatttaatcgatgcagcgatagaaaatgcagtaaatgaattagggcactctaatgtaaagaaaattgctcctgaaaagtagggtactgtaatcaatattttattgtataaaaattatgactatgttacgattattatatagattattaaattatgtgtgcatatagagatgcatgcataattttttatagtgcgctatcaattaataaaaaggtgtgtaaattaatatgacaaatgaaaatatagtagatagtaacttaagaaaaaaaggacttatatttgctgtattagcctcaactctatggggaatatctggtatagctgcgcagtatttatttcaaatggaagactttagtccagaatggcttgtggtaattaggcttatcatttcaggtgttcttttattagcagccacatatgtagctactaaaaaaaatatatttaaagtgtttaaaaatagacatgatatttttagttttattatgtttggcttcgggggtatgttagcagttcaatatacatattttgttgctattaaatacagcaatgcagcaacggctacaatactacaatatctttcaccagtaataattacaatatatttaatagtacatttaaaaaagttgccaagcctctatgaagttataggtataattttagctcttataggaacattttttataattacaaaaggtgatataaaaactataaatatttctggaataacattattttggggaattctttctgcaattgcagctgcagttaatacgttgcagccaagaagaatactagctaagtggggatctaatttagttgctggttggggaatggttataggtggtgttttaatgtcatttgtacacagtcccttccagtttaaagggcatatatcattagtatcaatttcttgtgtagcggttgtggttataattggaacacttattccattttggctttacatggagagtataaagtatataaaaccaacagaagccagtattcttggtgcttttgaaccattgtcagcagcgattttatctttagcattttttaatctccattttagtgttctagaatggcttggaagcggatgtattatacttacaacgataattctttctacggtaaaaaatagtagtaattaaatacatattttatagaataaactatagagattatgagttttatatttacttataatcttttttttcttagtaataatatgtaagactaaatttgacaaaaaaaatgttactatatataatagttataaaatataacaaaaaaataggagtaactaacatggggaatgatcaaattgatgaaattgttaatgatattttttatgtaatgcccgctttcgctaaaactatgtttgggttacttgaaagtaccttttatcattgtgagttatcaaattcaagcataagagtactatttgcattaaataatcataaaaagattactattactgatttaggaaaagttctttgtgctcataagcctaatgtaacatcatgggtagattgcttggtgaaaaatgatttggcatgtaggctgtatgatgataacgacagaagaataatatatatttctcttacggaaaatggaaagcttactattgataaatgcaaagaggttttgaacaagtcttttgctgaaagattagcacatttaaatgatgaagacttagagttacttattcaaacgcttaataatatgtcaatgctattaaataaaataaatggacatagttaaaatataatcttgggagtgagaaaaatggatacaaacaaattattttataaaactttgtttaaaggacttttttcggacacatgtgaagtaaggttctgggatggtgaaacagaaaaatacggtgaaggtgagagtaaattcaagataatttttaatgagcctatatctaaaggagatgtcataaaagatccttcaatggcatttggtgaaggatacatggagaaaaagcttgatattgaaggtagtgttgaagatgttatccaatcactatacaacaataaagaaagctttatgagaaatggagaaaagtattccaagctcattaaaatcttacctaatacaattagaaaaagtaaaaaagatataaagtttcactatgatataggaaatgacttctataaattatggctagataaaacaatgacatattcatgtggatattttaaatcccctaatgacagtttagagcaggcacagaaaaataaagttgaacatatattaaaaaaattatccctaaagaaagacgttactttgttagatataggatgcggttggggagaacttataataaccgctgcaaaggaatatggagttaaagctcttggagttactttaagtgaagaacaatttaaggttgttaaggaaagagtgaaaaaagaaggacttgaaggaagagttgatgtaattcttgaagattatagagagataaaaaatagaacttttgatagagtagtaagtgttggaatgatagagcatgtaggtaaggagaatatagctgaatactttgagacagtgaacaagcttcttaataaaggtggaatttcacttcttcattgtataacaggagtaaaaaaaggcggtacaaatacctggataaataattatattttcccgggcggatatgttcctgctgttagagaattagttaacaatatttcagaacaagatttttatttagtagatgctgaaagtttaagaagacattatggtaagacacttgaatgttgggcagaaaattttgaaaatgctatggatgagattaaaaaaatgaaggaagagccttttataagaatgtggagattatatctaaatgcttgtgcagcatcatttaatagtggaaatattgatatacatcaatttctttttacaaaagatattaacgatgaaatatcttggactagggaatatatgtataaataattctaacagttaattagggcttctatatttaagtttaatctgtgtacaataaataaattatattcacagattaagtttaagtgtagaagcttttattatgtaataattaataagataaatttttcttaatatatctatcttatattttaaaaagttaaaaaaatgttgacattttgtgaatataagtttaaaatgtgtatagtattaaacatattagtttagtaggtattttattcaagaatattaaagcacctatacggtaggaggaataaagatgaattttagcgttggatattttttgaattcatttccggatttattaaagtatattcattatacgatatttatggcggtaatatcaacaattataggacttgttatagcaactattcttgcacctataaagatgcttaaaataaagggattatctcaagttataggagtgtatatatctttttttagaggaacaccgcttttggtacaattatttgttttttattatggacttccacaactaataaaacctctgaaaaatgtaacgccacttgaggcaatgattttaggacttagtttatgtggttcagcttatatggcagaaataataagaggagctatagagtcagttgaaaaaggacaaatggaggcagctttgtcagttggaatgactaaatttcaagcgtttactagaataatttatcctcaagcaataagagtggcaatcccaggaataggaaatcaatttgtggatttgttaaaaagttcatctcttgcttttgttctaggtttaacagaaattttagccagagcacaaatgaatgcggcttctagttttaaggttatggaaagttatctttctttagcaataatatattgggtgactgttgagatatttaactttcttcaaagaattattgaaaaaagaatatcaagggcatactaaggtggtgagtatatgataaaaattgaaagtcttcataaaacttatggagataatgaggttttaaaaggaataagtttagagattaaagctggagaaatagtagcagttataggaccttctggaactggtaagtctacctttcttagatgtttgaattaccttgaaagaccagatagcggaactttacttataggagatgtaagagttgattttgagaatataagcaaagatgaagtatatagtctaagaaaaaaaacttctatggtatttcaaaattataatttgtttaagaacaaaactgcattggaaaatgtaatggaggctcttagggttgtaaaaaaaatgcctaaagatgaagctgaaaaagtaagtttagaagcgcttaagcaggtaggacttttggataaggcgaatagctatccatcaaggctttccggggggcaacagcagagaattggtatagctagagcaatggtattgaagcctgagattattttatttgacgaacctacatcagctcttgatccagaatgggtaggagaggttttagatgtaataaaggggattgcaagcaggcatctaacaatgataatagttactcatgaaatgagttttgcaagagagatagcggacaaaattgttttccttgacggaggaaagataattcaatatggaacaccagaagaggtgtttgagaaatctaataatgatagggtaaatcaatttataaaaaagttacactaggaggaaataaaaaatgaagaagaagttaattacattatcaatggcattattaatgagtgtaggaatattcactggatgtacacaaagcggcacatcaaatagtgataatagcgataagaatgttataaaagtaggtacttctactgactataggccgtttgcgtttataaatcaaggtgagagccaggataaggtaaagggccttgagattgatgtatggaatgaaattggaaagagaaataattggaaggttaagtatgtaatagctaattggaatggcttaataggtatgcttgattctggaaaggtcgatacagtagctcatcaggttacagttacagaagaaagaaaaggaaaatattatttttcagatccatatgtttactcaggagttcaacttgcagttaaaaaaggaaataattcagtacaatctttaaaagatttaaatggaaaaacagttgcagttgaatcaggaatgaatttctataaagctatagaaaaatataatgctaatggtgggaaagttaatataaaacagtacagtgattataattcaatcttttctgaggttaacttaggaagagcagatgcacttgtagaggataaacttgctataatggatactataaagaactcaaaatacgatcttgagcttgcaggaaagcctatagagaatatggaaaatgcatatccatttattaaaaacactgcaaacaagcaaaaagtagataaaataaataaaacattagcagcaatgagaaaagatggaaccttaaagaaaatatcagaaaaatggttcggagcagacataacttcaaatacggaagaataaaaaataactatggtgccagtaaggcatcatagttattttttattatcactatctttaaaataacaatcaataattttttcagccattcttttttgtatatttgcacttaaaattaattctgatattaataagaagagctgttcgtttttagtcttatcttcagtgttagttttgtctaaaaaatttaatttatcatctaagccttttataaatgaagcggaagaattcttttgtgctaataaaaacttatcatataaatcgtcaatatttataccatcagttgaacttaccatgaaatttagtaaatctcctatatcaccaattgaaagtgtctgctttagatgatatataaatattaacatcatcatattttctttgctgtatttttttttaataggaggagctattaatttattttttgtataattatttatcatagttttagttaagataatatcatcatcacttcttttaaaggctttaagcttattttccataaaagatgtgacttgatccatatacaaatctatatctggaatttcatggtttttaattggagtataatcgagtatttgtttagctaattctaaaatttcatcattcatattatcacctttttatattatatagcattgctttgtaggtaacaacatgaatttattttagtaatattgtaaagaatataaatatatgaagcttctttaaaatttatattgcaatataattatacatgttgtattatattgatatagtgataagtagttttaaaaactacatgataaaattttattagaaggtgatagtatgttttcgaaattaaaggatcctgtaagtggaattactcacttggtgggagctgttttatctataattgctttggtttgtatggttcatcactctatagttgcggacagtaagattagtattgctgcgtctataatttttggagtaagtctaatttttctatattcagccagtgcatcatatcatttgataaatgtatctaggcgtttaacaacaattttaaggaaaattgatcatatgatgatctttgttttaattgcaggaacatatactcctatatgtttaataactcttaatggtaagattggtaatataatattgtttctaatatgggcagttgccatattaggtatagtattaaagcttgtatggtttaatgcacctagatggttatatactttattttatatagctatgggatggattgttgtatttgcttttgcacccataagtagaattatggcacttcctggaataatcttcatggttttaggtggaattgtttatagtatgggtggaattatatatgctttaaagtggccagtaagaaatgctaagtactttggatttcatgagatttttcatctatttgttatggcaggaagtttatttcattttattatgatatacaactatgtcatataaattattgcttagagtataaagtgtattttatactctaagtttattttttggttaatttgcaagggagttgatttattgataaaaagtatttagaatttatagatgtaagctaaattataagagacatgtaggaaggagaaatacgatgaatgaacctaatgaacttgaaacggaaggagtgtggaagcttcttttaaaattttcaataccatctataatagggatggtagttaatgctttatatagtattgttgacagaatatttgttggaaggggggtaaattctactgcgctttctggcgtagctataacatatccaataagtaatgttatacttgcatttggaatgcttgcaggtataggatgttctgctctagtctctataaaacttggtcagaaaaaggtaaaacaagctgaaaaaataattggaaatacctttacgcttttaattatattttctttagtagtaactttttttggactaatatttcttgaacctatgctgaagcttttgggggcaagtaaaaatacaatgccttatgctaagcagtttgctgttataattttatctggagtgattcttcaaaatatgggatttggtcttaattcaacgatgagagctgaaggcgaccctaaaatggctatgaaaactatgcttataggagcagttttgaattttatcatgaatccgctttttatttttgttttaaagttaggagtaagaggttcagcactggcaacaatagtttctcaagcagtttgctctgtatgggttctttattattttataaaaggaaaaagtttccttaagataaaaagagagaatataagacttagaagagaagtagtaagagaggtaatatcaataggtatgtcaccttttgctatgcagcttgcagcaagtcttattaccattacatttaataaaagcttagaaaagtacggtggagacacttcaattgcagctttttcacttataagcagcattcaaatgttgatattgatgcctatatttggaataaatcaaggttctcaacctataataggatataattatggggcaaaaaatataaaacgtgtaaagaaagctctgtggtatgctgttctttcagcattatgtatttcttttttgggatttattattgtacagatattcccaacacaaattatatcgctatttaataaaaacgacatgaagcttataggggttggaacaagaggaatatcaatttttcttttgatgcttccagtaatagggcctcaagcggtttgtactaattactttcaggcagttggtaaggctaaaaagtcaatgcttttaagccttttaaggcaagtaatattcttacttccttcgcttatagtacttccaaggttttttggattaaacggcatttgggcagcaggaccaacttctgattttcttgcttttgcagtcacaacaatcattataatgatcgaaatgaagaagataggtgaaataaactcataagttattattctgcagcttctaaaatttcttttaaagagttaatatctaatattgtaatagatgttctatcaaagtctataattccttcttcacgtaggtttatgaattctctagataatgatggccttggaattccaagcatttcagacaactgtttttttgacttattcattttaaaagttaagttattttgagcttcgtactgttcaagtatatagtttgatattttctctcttatagtatgataagacatattttttaattttttattcaacatcaatatcttattagatagaagagacataaagccattaaggaaaagggaattgtcgctgcataatttagatattgaggctttgggaataaaaattatagtacttttagtacatgctattattgtagaaggatagcttgttttattggagaatattattgcttcaccaaatatcttgctttcttctagtgttgttattgtaagacttttaccagattcgtaaattttctgtatttcaacacaaccgcttaatactattccaattttattgcacgtatcgccttcaattgcgatagtttcatctttatagtattcttttattgagtaatttatagatgaaaataaatgatcaatttcctgagtttcaatttttgaaaataagatacaatgttttaatacggttaaaatttttttatccatgtttttctcccaatacttttttgtgtaacatatgttactgatatatttatataattttaatataatttaatcataaagacaagtaattttattttgcggaactttatatttaggaggaaaaaaatgaaaagaaaaatagtaaacatagataaagataaatgtaatggatgtggactttgtagtgaagcatgtcatgaaaatgcaattgaaataattaatggaaaagcagagcttttatctgatgaatattgtgatggtttaggagattgtttacctcattgtccagttgatgcaataactataatagagagagaaagtaaggaatatgatgaagaggcagttcagagaagaattgaagaaaagaaaaaatcaaagttagctaaaccctgtggatgtccaggagctatggctaaaaaaatagaaagagtagctaagcctttagctaaagtaaaggaagataggtcttctgtttcagagttaatgcagtggccagttcagttaaggcttgtaagtccaggagctccatattttaaaaatgctaatcttttagtagctgcagattgtacagcctatgcttatggtgactttcacaatgattttataaagaatcatataacagtaataggatgtccaaaacttgatgatgttacatattacaaagataagttgaaagaaattatagaacttaatgaccttaagagtataacagttgttagaatggaggtaccttgctgttcaggcatagtttcagcagtaaagactgctatgcttgaagcaaaagttatagtaccttttagagaagttattataggaactaatggtgaaattagataaaaataagaacctattaaaataaatgggcgctgctttaatgcagtgtccatttattttaagtttaaatagaaacgtatatagcaaaatttagtataaaggtaataaagtcttggtgaattctatataatatattcaaaatggaattaaggtggaaagaatatggataatcctttttttgaaaatggttttttatgtccgaatgcatccataaacaatttagttatagaaaaaatgccaactgataaagttaataaaaatttgcaaggtaaaactgcaatagaagtattttctacagaattattcataaaagaaattaagaaaaatgctaatgaattaaacttagatgttgataaaatagaggagaagattttacctcagtacttaaatgattttttggaatgtgattattgtttatctaagaggatagcaaataatattgttaagttatttggtgagaggttaggagttattttattaatcttaaagaaaggtgaaaaagagaacagacttaagagaaaggattgggatcaaaggcattgggattattggaagagtattaaaaatgtaattttggcaggtggactttcaagttcaaagcttggtgaaaatttgaggtatcatgcatataaggtatttgaaaattcaaatgaagatgggtataacattatattaagccaaaattcgtcaaacataggtataaaaggttgtagtagatatataaaagaaaataatggggaagaagtatatttggtctttgattggggacaaacttttataaagaggggtctggtgacaattggcaaggatggagctaaagatattataaatttaaataaggttttatctaagcatatattatgcagttttaaagatgttagagaagaaaaaaaggaagctattaatttgcataaatatctcttaagcataattgtaagaacacttgaagaaatacaagataaagtaaaaaaagtccaagataatatagtaattagtgtggctaattatgttagaaatggaattatggctaataggggtgggtacggaaaactgaggcttttaacaaataattatgaaaaatatctatcctgttccttatatagaataaccaaaagagaatttaaaattaaattaatacatgatggtactgctatggctgctgaattttcaaactatccaaattcagtgtgtatatctttaggaacagtgtttggagtaggatttcctgttttagagaatgctaactaaaattttattataagagattattgtaagtatgagctttgtgatttttcttgaaaaaagatagaaattataatatccttatatataaaataaattattaaaggtgacttatatgtattgtattgaggaaaaaatagaaaaagcattgggaataaaagaagcctcacttgtacttaaaaattgtaatatagtaaatgtattttcaagtgagataatacgtggagatcttgctatagatggggacactataataggaatagggaaatataaaggaaaaactgaaatagatttaagtaataaatatgtagctcctggatttatagattcacatgtgcatatagaatcatctatggtttcgcctaaggaatttgcaagagcagttatatcaaggggaaccacaactataattgttgacccacatgaaatagctaatgtgtgtggaatggatgggataaaatacatgatggaggaaacaaagaatatgccacttgatgtattttttatgctttcatcatgtgttccggcaactagttttgaaacttcaggtgcagttcttaaggctgaggacttaaaggaattgattgacagtgatagagtgcttggcttaggtgaaatgatgaactatcctggtgtattaagtagagaagaggaagtactaaataaattaaagcttgcaggaagttataataagatagttgatggtcatgcaccttcagttagaggaaatgaattaaatgcatataatttggctggaataaaaactgatcatgagtgcagcagtatagaagaaatgaatgagaagataagaaacggaatgtatatagcaattagagaaggctctgcagcaaaaaacttagatatacttataaaaggagttaatgctaaaaatgaaagaagaattatgttctgtgcagatgatagacatccagatgatattttaaaatcagggcatatggataattgtgtaagaagagctatatataatggaattgaaaatacagcggctattaggatggcaagtattaatgcagctgaatgctataagcttgaaagagttggagcaattgcaccttcatataaagctgatttagttgttttggaggatttaaaggatgttaaagtaaacatggtaataaaaagtggagaagtggtatttaaggacaataagcatttaaaggatatgggaagtaaaagcgatattacgaaggtcagcaatacagttaatataaaaaaagtaagtgaagaaaatttagaactaaaattagatacagatgtttgcagcattatttccgtagctttaaacagtatatcaactaaaaacgtaaagagaaaagtcaatcttagtaatggtatatttaaatgcgagctcaattatggaataaataaagttgcagtaattgaaaggcataagaagtctggaagtataggaataggtcttgtagaaaactttggacttaaaaggggagcaatagcatccacagtagctcatgattcacacaatataatagttcttggaaataacgatgaggatatggtgaaggctgtaaatgaaatagaaagagttggaggagggataacaataagtttagatgggaaaataattgaaacacttgaattagaaatagcaggattaatgtccaataaatcaatggagtttgtggcagaaagagtttcaaaaatgataaatatatgccataatactttaggtgtaaataaggatattcagccatttatgactcttgcgtttttagcacttccagttataccagagatacgaattacagataaaggtgtatttgatgttgtgaattttaaatttctataaataaaaaggaagttgattattttggaatattaacatatttttggtagataagctaaaaaaaattagtaaaaatatattcatataagtaaaaaaatgtgatatgctatattgagactgaatattggtttattaaatgcagctttaaaaagctgcatttaatatgtaataatttacttagagaggaaaaacatatgaataagtttttggataagtttaaaacaataaaatttgatgtattatttattataactttctttattttgattttgaagttttctatatttattggatttacaacaattacaaacgcgaacttactaacggtattcaatggttttttcaatatagcatcttattctattttaataatatttacacttggatatctgtctatagcacttttatttaaaaatagagcaagaggtacggcgcttatagtattgaatttaattatgtcaataatacttttgggagatctttggtattacagagggtttaattcatttttatcatttcatttactcaaggaaacaacaaatttggacgaccttcagggaagtataatagcaatgatacataaggaagatttaatatttgtagttgatttagtaatcattgctgcggtatatttattttctaggaacagctataaaaagtgtaagagaaatataaagctttttgctatatttattttggtagctatgttgtatattccggtttcaataagaatatttcacaactacacatataaatactggacagcttctagatggaaccctatatacactatggaaagaatatcgcctataggatatcatgtgtatgatggtattgacttttttagtgatttaaagcctcttgctttaaataagaaggataaaggcaaaataaaggcatggtacaaagaaaatcaagaaaatcttcctgataataaatataaaggaatgtttaagggaaaaaatctattagtaattcagacagagtctcttgagaactttgtaataaatcagaagatagatggacaagaagtaacaccaaatttaaataaaatgattaagaatagcatatacttttcaaattaccatgaaaatgtgaatttgggagttagttctgatgctgatttaatgacgaatgcatcaatatatccagttagaaggggaagtacattttttagattccctgataataagtataattctcttccttctataatgaagaaatatgggtattatactatggcaatacatccagataaggcaatgtattggaattggatgcctgctttaagtgcaatgggtggatttgatagaactatagattcatcacattttaatgaatatgaaaagataaatttgggaatatctgatggagcttatttaaagcaacttgaacctatgatagtaaatgaacaaaaacctttttatgattttgttgtaacacttacaaaccatacaccatttgttcttcctacgaaatacagagaactaaaattagataaggcatttgatagtactgaaatgggagggtatatgcagtgtatacactataccgacaaacaaattggtatattcttagataaacttagaaatgcaggagtactccaaaatactgtagttgtgatttatggtgatcatacaggtatacacaagtattttcaaagcgagattcctaaaatgcctggcataaagaattggatgatagatgatcaaatgaaaatacctcttatagtgtatgatggaagcggaaaaatgcagcaagaggagaagaatgtgacaggtggagaaatagatttaatgcctacaatcttatatactatgggagtggacaaaaaatactacgaacaaactgtcatgggaagaaatcttttaaatactaataaggattatgatcttttaactaatggaaaaattttaggaaatccatcagcagaggataagaaacatctttcaaaagcgtttaatataagtgatgatataatacaaggacaatattttggaacaaaaaataaataacaaagaatcctattcatgttttacttaagctgaataggattttttgttaccgttatggtttaatcttttagaaaacagaagtcttgaagttataaaagaagtaattggaattattaggattatacctataccactggagaagctttgaaatagttcagagcaaaataccttggtgtttagtatgtcataaaaggaataatgcacttcactgaaatatattgaaagtgtcataaagcttcctatataagcgaaaagaagagtgtttgtcattgtaccaagaatatccttgccaatgttaataccagatttaaatagctcatattttgtatgagaaggattgtttaaatatagttcatgtagcgaagaagatatagatatggatacatctattatggctccaagtagccccaaaagtatttgacacgatactatttttgagaaatttagctgtacgtaggtagataggtaacctaacgattctgcttgttcttttccaaaaccttgtatttgagctttactacttaggttgtaggttattataagagttaacgcaactactatgacaacagaaaataaagaggataaagtttttaaattaaagctatttataaaaaataaggtagtaattgttattataatacatcctattattgttacctttaaagggtcaaacttagcgcctattaaaattaacagaattagcattattacgaaattaagaatcagtgtaaaaaatgattttactcctctttttcctccaactattatcatcaagataaaaagaatgataagtaataaaaatggaacattcatgattttataaattctcctattcttttattatttaaaagtactacagctacaaagatagaaataggtatactaattactattcctatacttccggtaagggccctcagtatctcaagagataaattttcatttagtatgttgtagagaggagtttgatttctaagaagcagtattataaaaggaatacttccactaaaatatgcaaaaagcatagtgtttgacatagtccccataatatccttgcctatttctaatcctgattttataagtgattttgtttctatacttggattttttaaataaagttcatttatagcagctgaaattgaaattgctatgtccataatagcacctaaggtacctactaaaagttctatataaaacattttttcaggcggatgagttaaaaattccatctcctcaaacctaactccgtttgagttatttaattttattgcagctatagctattaaaattgttattgttgttccaagcaaagtagaaaccactgcagaaattgtttttttgtttaaccctgacaccataataagagataaaactgtaaaaagcagcatagctgttaagaatataaatgcgatactaaagttattcaaaaaaagctctattactatagagaatattactatatttattaccacacttactaaggagcgtagtcctgttttacctgatattgcaattataagtaatataaaaatgaaagccacgtaaaatacatatttatcacgttttagttcaagtatcttaatggacttagcgtttccctttacattttgtgatagtgatataaataccttatcatttacatgtagatttatatcatttatttgtgaataagaaactatattttctagttttatttctttaccggagtactttccgttgagaattactgcagttatatgctgttttttcatagcttcatatcttccgtctgaggtttctgatttgaagttattttccgatatggaaagtacttttgcaatggtctttttatatgaattttcatttgaatttactatgtatacgcctagtaataataaagataacaaggctatgaatacaagaaaatattgcttgtatttgtttgaaggtattatttttaatttcaaaggaagcatttcatctatctcctaatatatatgtattttatatataataatagcatattaggcaacaataagcatatgttattttaatatttctattgacacatgttgtaaaaatgatatataattacaacatcaaaataaatttgtttatggagtgaataatatggatactattagaaaggaaaatacaactaaaaattattattggttcagcctaggctattattactttagtagcgttggtttttttgcatatcaaaaaataataaattttctttctaatgagttttacaatttaaattgtgttgaatgttaaggcaacacaagatatttaagaatatcaattattgtttaaatatagggctcatatgagccctattttttttataaaaaaacaagaacagaaaacagaaaggggctatcaaaagatggtaattatatttaaacaaaatactgaaaaatcagaaattgaaaaaattaagagggcaatagagggtgatggctgtgaaacaacagtatcacatggtaaagactacattgttgtaggagtaataggagatacgagtaaagtgaatattgagagaattcaggcaaatgaaaatgttgataaagttgtgagagttcaggaaccttataaaaaggctggaagacactttcatccacaggatactatagtggatgtagatggaagcaaaataggaggaaaaagacttgctgttatagcaggaccttgctcagtagaaagtgaagagcaaatagttgaaattgcgaaaagagtaaaacaaagtggggctaattttctaagaggaggagcttttaaaccaagaacttcaccttacagttttcaaggattggaattagagggtttagatcttcttaaacttgctaaaaaagaaacaggacttccaatagtaacagaaatcatgagtgcagattttattgatagatttgtagaggatgttgatgttatacaggtaggagcaagaaatatgcaaaacttcacacttctaaaggaattgggaaaaactagaaaaacaatattattgaaaaggggattaagcgcaacaattgaagaatttcttatggcagctgagtatattatgtcagaaggaaatgaaaatgtagtattgtgtgaaagaggaataaggacatttgaaacttacacaagaaatacacttgatttaagcgttgttcctgcaataaagaaattaagtcacttgccagtaattattgaccctagtcatgctgctggaatgtggtggatggttgaacctttagctaaagcggcggttgcagttggagctgatggacttatgatagaagttcataatgatcctgctaacgctaagagtgatggacagcaatcaataaagccagataaatttgatgaaatcatgaagaaagttagagctattgcagaaatagaaggaaaacaagtataaaagatatttcagctgggggtgattttgtggaggatggagaatttaatattaatttaactattgtagggcttggactcatgggcggatcatatgccatggcgcttaaagaaaaaaataaaggtcatatatggggagttgacttagataataatacccttaaaaatgcagctgaaatggatataattgatgagggatatagcatagaaaatgcatatatccccctcaaaaaatctgatattgttataattgctatatatccagaagcattagtacaatttgtaaaaaacaatgtgaataattttaaaaaaggggctataataacagatgttcttggcataaaggaagataatataagttacatacagagtattttaggagatagtgctgaatttttaggtggacaccctatggctggtaaagaagtaagtggattttcaaatgcatctaagaatatatttaataatgcaaactatattttaacacctacagtaaaaaataaaaaagatacaatagaatttatgaaaaaatttataagaagtattggttgcacatctattacagaggttacacctgaaaaacatgatgaaataattgcatttacaagtcaacttccacatgttattgctgtttctcttatgaatacaaagtctgcagatgatataaaacattttgttggaggaagttttagagatgctacaagagttgctatgatcaatccagatttgtggtgccagctttttatgagaaataaaaagaatataattgattcgatagaagaatttcaaaaaagcctaaatcagataaaaggttttataaaagaagaaaatgttaatgatataaaacagtttttaaaagatgcagcttctaaaaaggagggaacggtttgaaaactttagagatggaattaggacaaaatagctacagtatattcattgaaaagggcataatgaatgatattggtaaaagaatttcaaagctttattctggggagaaaatagttttaataacagatgataatgtaaataaattttatggcgaaaagcttgagaaaaatattaaagattttggatacgatgtgtttaaaatagttataaaagcaggggaaaagagtaaaaatataaagacgctgacagatatatattcacgtcttgcagagtttagaattacaagaagtgaccttatagttacacttggaggcggagttgttggagatataggaggttttgcagctgcaacttatttaagggggatatcctacattcaaattccaacatctcttttagcacaaattgatagcagtataggtggtaaagttgctgtggatttagagcagggaaaaaatctagtagggaatttttatcaacctaaggcagtttttatcgatccactttttttaaagactttagatataagatttcttcatgatggaatgggagaagttataaagtatggggctataagggatggcgaattatttaaaaggctagaagagtttaaagatgataatgaacttatggacaatatagaatatgttatacatgcctgctgtagaataaaaaaacaggtagttgaaaatgatgaaaaggataatggagaaagaatgatattgaattttggtcatactataggtcatgcagtagaagaattttttcattatgaaaaatttactcatggtgaatgtgtagcatatggaatgtattcaataactaagaatagcgaaagattaggaattactaaagaaggtacaactgagaaacttaaaaatatcataaaaaaatatagtttaccttttaatatagacaatcttaaaaatgaaaggatttatgaaattgcagcgctggataagaaaagcagaggaaaatttataaatttggttcttttaaaagatataggagattgctttatagaaaaggtagaaagtaaagaaacttataagtatttacgtgtagtttgaagggggcatgaattttgaattgtgttaaaataaatccatgttgtttaaaaggagatataaaaatacctccatcaaaaagtttaggtcatagagctataatatgtgcagctctctcagaagaagaaagtactatagaaaatataagttattctaaagatataaaggctacatgtattggaatgagtaaattgggggcattaataatagaagatgctaaggataactcaacactgaaaataaaaaagcaaaagctagtaagtaaagaaaaagtatatatagattgcagtgaatcgggttctacagtgagatttttaattccaatatcacttatagaagaaagaaatgttgtgtttgacggtcagggaaaattatcctacagaccattagattcttattttaatatatttgatgagaaggaaattgcgtactcacatccagaaggaaaggtactcccacttcaaataaaaggtaggcttaaagctgggatgtttaaccttcctgggaatataagctcccaattcataagtggacttatgttttctcttccttttttggagggggactcaattattaatataacaactaatttggaatctgtgggatatgttgatatgaccatagatatgttaaaaaaatttggaatagagatagaaaataaagcttataagagcttctttataaagggaaatcaaaaatgcaagggtacaaaatataaggttgaaggagatttttctcaagctgctttttggctatcagctggaatcttaaatggaaatataaattgtaaggatttaaatattagttctctgcaaggtgataaggttatattagatatattaaagaaaatgggtggagctatagatgagaaaagctttagttctaagaaatctcatacccatggaattgtaatagatgcatcacagtgtcccgatttggttcctatattatcagtagttgcagcattaagtgaaggaactacaaagatagtaaatgcagcaaggcttaggataaaagaatcagataggcttaaagcaatggctacagaattaaataagcttggagcagaagtagttgaattagaagatgggcttctaattgagggaaaagaaaaattaaaaggtggagaagtggaaagctggaatgatcatagaattgcgatggcacttggaattgcagctttaaggtgtgaagagagtgttactataaatggaagtgaatgcgtttctaagtcatatccacagttttggagtgatttgaaacaattaggaggcgatgtacatgagtggagtttgggggaataaaattaaattatcaatttttggagagtcccatggaaaggcgattggaattgtaataaacggacttgaaccaggagtagagcttgaccttgaatttataaattctgaaatggagagaagagcacccggaagaacaaaatattcaactcaaagaaatgaaaaggataactttgaaattgtaagtggattttttaatggtaaaactacgggaacaccactttgcgcaattatatggaatggaaaccagcattcaaaggattattctaatgtaaaggattttgcaagacctggtcattcggattatactggatttatcaaatataaaggctttaatgactatagaggcggtggccatttttcaggaagacttacggcaccattggtatttgcaggtgccgtagcaaagcaaatactttttaaggataacattataatagggagtcatattcttagtataaaggatacaaaagagaagtattttgataaggtaaatatagatagtgaaacacttatatcgttgacaaagaaggcttttcctgttttagatgataaaaaaggtgaggaaatgaaggaggttatacttaaagctaaaaatgatttagattctgttggaggtataatagaatgctgtgctttaaaccttccagcaggaaagggtgacccgttttttgattcttgcgagagtatattaagtcatatgctattttcaattccagcagtaaagggtgtagaatttggagaaggctttaatataaccaaaatgaaggggtcagaggctaatgacgatttttataccaaaaatggaatagtaaaaacttattcgaataacaatggtggtatattaggcggtataacaagtggaatgccattggtgtttagagctgcttttaagcctactgcttctatttacaaacctcaaaaaactataaacatgaaaaccatggaaaatgaggagataagtataaagggtaggcatgatccttgcattgttttaagggcagtacctgttgttgaggctgcatgtgcattatccatattagatattatttgaggtggtaattttaatgaaggaacttgaagaaataagaaaagaaatagacgaggtagataaaattataacagagctttttgaaaaaagaatgaatttggttatggaagttgctgagtataaagaaaaaaatagtattccagttagtgatagcaaaagagaaaaaaaagttatagataaaaatataggttacttaaagaataaggaatattctgaggttcttaaggagttttatattaattttatgaacctaagtaaaaagttggagagaaaaagaatttataatgaagaaaaaacgagtgttaatacatcaatttatggtcttataggagaaaagttaggacacagccattcatcatatattcataagcttatttttgaaaaggtaggcattaagggaatatataatttgtttgaggttccaaaagaaaagcttaaagaatcagtagatacctttaaaattataaaatgcggtggattaaatgtaacaataccttataaggtggaggttatgaaggagctatatgaaatttcagagaaagcaagaaaaataggggctgtaaatactttgaagttttcacgagaaggcataagtgggtttaatacagattacattggatttggaaaaatgcttagtaaatttagggttgaaataaagaataatatatgtgttgttttaggaagtggtggagcagcaagagctgtgcttcagtatttaaaggacaactttgcaaaagacatatatgtggttactagaaaccctgaaaagacttctgagatttacggagaatttaaagtcataagttatgatgaactttcaaatttaaagggagatgttataattaactgtactccaaagggtatgtatccaaaagagggggaatcgcctgtagataaagaagttgtagctaagttttcttcagctgtagatctaatatataatccagtagaaactttatttttaaagtatgctagagagagtggagtaaaggctgtaaatggtctttatatgttagttagccaggctgcagcgtcagaagagatatggaatgatatttctatagatgaaatcatagttgatgaaatatttgaagttttggaggaaaaaataaaatcatgaatttagtacttataggtatgcctggatgcggtaagagtacaataggtaaaattttatcaaaagagctaaatatgaaattttatgatgctgataaatatctagaagatagaaataatatgaagatttccgatatgtttaaaagaggagaagaattttttagaaatttagaaagtgcagccctaaaagaacttagttttgaggagaactccgttatagcaacaggaggaggcgcagtaacaagggaaaaaaatatactttgtttaaagaaaaaaggaaagatagtatttataaataggccgccagaaaagataatggaagatgttgatattgaaaatagacctcttttagaacatggaaagagcagaattcttaagctctatgaagaaagatacaaattatacattaactactgtgattatcaggttttaaatgatggatctatagatagagttgttttaagcataaaaaaataccttgaaggggagggaatttaatgaagattcttgttataaatggtcctaatataaattttttggggataagggaaaaagaaatatatggtgaaggaacttatgaggatttgtgcaaatttataaaggatgaaggaagtaaaataggtattgaagtagaagtaatgcaaagtaatatagaaggagaaataataaattttcttcaggcagcctacaacaaggttgatggaatagttataaatccaggcgcatatactcactacagcatagctatatatgatgctataaaatcaataaatataccaacggttgaagtacatataagtaacatacacacaagagaagaatatagaagaaaatctgtaacagctcctgcatgtattggacaaatttgcggatttggattttatggatatgttatgggaataacggctcttaaaaatatgctttcaaaatgatttttttaagcaatttttgcaaagagctgtagttcctttatttgcccaaattatattatcattggtgactttttttccgcatatactgcaagttattgtaccattttgagctgattttttgggcttttgtgttttggtaataagtctttttttatttgaaggtggatcataaagtatgggttcatcttcttcctcttttttgaggatagaatacttcattttgaatttactttcagcaaaaagttcaagttcgaatctaggattaatcatatcataatattcttcaataattattcttgttatttgagcatcatttactataattccgcttttttctattccgtcaaaaatacttttagttatattatttgtatctggatgcctttttttacttttataaaataccttcaaaactgctataattgattcagaaattactgtatttggattttgagagcgagcctcatatgctattgtttcttcataaatggcatatctatcatgatattgtccagagttataaggtaggatagctcttccgtttatgttagataacttaaaatttgattttgatataggtgaaccaccaacaattactttagcgtacaaatttttcataattactccctctcaagattatagaattactagtgcatgtagtttatataatatataagtataacacaaacatacgttcaaaagatatattgatttaaaaatgtattggtatgtgataaaataatatagtaaaatgccagaagagttggaggaatattaaatgtgtaaagacattaagatacttgcaatagaaagtagttgtgatgaaactgccgcggctgttgttgtcaatggcagaaaggtattatctaatataatatcatcgcaaatagatatacataaaaagttcggaggagtcgttccagagatagcatcaagaaagcatatcgaaaatatatcattggtggttcaggatgctataaaagaagctggtgtagagcttaaagatattgatgctgttggagttacatatggaccgggacttgtaggagcgcttcttgtaggacttcaatatgccaaaggacttgcgtactcaataaacaaacctcttataggagttaatcatatagaaggacatataagtgcaaattttatacaatacccagatttaaagcctccatttgcatgtcttgtagtatctggaggacatacttttatagtatatatgaaagattacggtgagtttgaagttttaggtcagacgagagatgatgctgcaggagaagcttttgataagattgcaagagctataggtcttggttatccaggtggacctaagattcaggaaatggctaaaagaggagatgaaagtgcacttcaatttccaagagctaagtttcatgataattctttggatttctcttttagcggagttaaatctgcagtactcaactatttaaatactatgaagatgcaagaaaaagaaataaatagagcagatgttgcagcatcatttcaaaaaaatgttgttgatttcctggttgataatactattaaggcttgtaaaataaagaagatagatagaatagcagttgcaggtggtgtggcctcaaacagcttcttaagggagacaatggtaagtcgaggaagagagaatgggatagatgtattgtttccagcaccaatactatgcactgataatgcagcaatgattggaagtgcagcgtattttgagtttaaaaaaggaaatattgcacctcttgatttaaatgctatacctaatttgaaactaggggaaagataaattgtaaaaaaatggttgtatttttgggaagaatgtattacaataaaaatgtaatatatttacaattttagaaaccgcataagttgatatgaaaggtgtgggtttgcatggtttcgggagtgtatacgagaaatgtaagcagagaagtgaaaaatcccaaaaaaagaaagcatattttttacaggtatatatctcaaaatatatttttgattatatccctagtgatttttgttgtgttggtaattggaataactttttctatagtagctaacaatactggaactaaaaaggtttttggagaaataggttttgaatttactatattaggtatattaataggatgttttatgtctatttttggatccatatggtataagaagaaaataagaatgatacaagataatgaacatataagaaattactctagaattataaaagctgacatagaaagaacaagtaggttatttgaaaataagagatttacttttataaaaataagtagtgtcactatattaaaaaattggattgaggctttcagtagtatatcttctaagcttacgcgtgatgaactccaacaactattcgattactattgtcaaatagataagttgcttgattatgaagttagaataaacaagcatcttgaggttatgcagtgcagtgcactaaaggattacccatacatgaaggagtataatgaactgataaaatcttttactatagaagtaaatatattgtttaagattgatacaacatcacttaaaaaaaagcttaagttattgtgcagctgattttagccctataggcgaaggggaattttaatgtgtttaatagattgaagagtagagtaagagatgttaattttgttgtaaatggttttgttggtgcaggtataataattataacttgcagttttgttggaaaagtagattttgtattattgtattttttaatacaaataatggtgtctatgctggctataagtatatttgcaaattctataagtaactataaatatacaaaagatatcttgattttaactgccggaatagtgtatttttgcattggtattttctactttaattctagtcttaacatattatatcaaaagaattatttgcagtatgtatacaagctatttatgattggaatctttgtagatgctttttcaacactattcttaagtttagttttaaataaaaaaggaaaattaaaatatgcagtatggttgtatgctttatttgcaatagttgtaattatgattacttatgattataaactattacatacatatgtaaataaggtggatataattgcaattatatatgcaacaaagataatatctgtaactattttgtctatatcaatgattctatttatatgtagaaagaagaaaattggcaatgatatagtatatacatttatcgtctgctctatattcagaattatatcaattatatttattgattataatagtagcggcaaccaaattctattgtatattaatatcatttttagaatatcatcaatatatatagttcatagaaaaataatgattaaatctgttatagatccataccaagatatattttttagaataaatacgatcaataaggagcttaatgataaaaatattgagcttgaaagagttaataaaaagcttttaaatgaaaatatgataaaagaatccataggcaaggttctttcaataagttcacaaagatatatgcagatacttcaaattatgccggaagccatatttattcacgacaatggaaagtgtaacttcataaatgacaaggctataaagcttttagaggttaaggatgtaaaggatattataggtaaaaatatagttgattttatacatgaagattataaggaacttgcacaagcaagaatagataaaacgatgaagacgggtatgccttgtgattttattgaagaaaggcttgtaactgcaatggggaaaaaaataattatagaagcagccacaacaaccttttcgcataataatgggacgtttataactataattagagatatgacagaaaagaagaaaaatgaagcaaatagaaagaaattggagcaaactctctattatgataaggtaagaaaggagtttttctcaaatttatcacatgaattaagaactccacttaatatattggcttctgcaatgcaacttgtcagattaaatatggacaatgataataaagatgggtttgaaaaatatcttaagattatgaatcaaaatatttatagattaactaagattatagataacttgatagacataacaaagatagatgcagggtatttgagtgttgatcttcatacagtagaaattgtaagtgtgatagaagatatcacaatgtccgtaatagaatttgttaagagtaaagggatagacattgtatttgatacggatgtagaggaaaaatttatgcctgttgactcagataaaatagaaagagtaatgctaaatttattatccaatgctgtaaagtttacaccgaaaggcggtaaaataacagttaatgtttatgataagaatgacagtattcaaataagagttaaagataccggaattggaattcctaaagatatgaaagaaacgatatttcaaagatttatacaggttaataaaactcttataagggaaaaagaaggtagtggaattggactttctattgttaagtctctaatagagatgcatggaggacaaataagggttgaaagtgaattaaatgtaggaagtgaatttataatagatcttcctgttaggaatttagatgatgataatgcaaaagttatagaaagtaataaatttaataagaaacagaaaataaacatagagttttcagatctatagtaataaaaaatctccgcatatcagcggagatttttttattcaaatgctattttttcatcttgtatatatattcttactttgcttccttctttatatattccttttatatagaattcggctagttcatcttctatatacttttgtattgtgcgccttaaaggacgagcaccatattttttgtcatagccattagagaaaataaagtcctttacatcctctgatatttctatagctatatccttgtctttaccttcatttattatttctttaagcattaagtctatgattttcataagttcatctttatttaattctgtgaatataattgtttcatctattctatttaggaattcaggtctgaaggtttcacgcagtacatccttaattttacctgaaagagatgaataatcatcacgtgaaaaacctattccgcttgattttaaatttgttccagcatttgatgtcataattattattgtgttttcaaagttaacagttcttccttgactatcagtaagtcttccatcttcaagtatttgaagtagtatattaaatacatctgggtgggctttttctatttcgtctagtagtataacagaataaggatttcttcttaccttttcagttaactgaccaccgttgtcgtatccaacatatccaggaggagcccctattaacttagatacagtatgtttttccatgtattcagacatatctactcgtattaaagctttttcgttctgaaaaagttctgaggctagagtttttacaagttctgtttttccaactccagtaggtccaacaaatataaaggaagatggtttttttagttttttaaatccagatctgtttcttctaatagttctagcaacacttgatacagcttcattttgacctattactcttttatgaagtctttcttcaagatttaaaagtttttctgcctctatttctgttatcttttgcactggaattttggtccaagattcaacaactgaagcaacatcgtctaatgttaatactacattactgtattccttactgaagttatctatttttgtttgaaccttacattcttctactttatattcagcagccttctcaaaatcgtttgattctgcacatttagttatttcattttgtatatttgagagttctgtttttaatgcttccaattcaacaagacctttatttttaagatttgctctagaaccagcttcatcaattacatcaatagctttatctgggaaaaatctatcagatatatatctaccagataatcttactgcgctctcaattacatcatcaggtattgttattttgtggtaaatttcgtaataggatttaataccttttacaatttcaatagtttgttcaatggttggttcttctaccatgataggttgaaaacgtctttctaaagcggaatctttttctatatattttctatactcttctattgtagttgcacctataagctgaagttctccttttgcaagagcaggctttaaaatatttgcagcactcaatgatccactttctgcattaccagcccctattatgttgtgaatttcgtcaataattaaaattacatttttaaattgatttatttcatcaataattcccttcatacgtgcttcaaactgtcctctaaattgtgttccagctactattgaattaagttctagcatgtatacctcggtatcaagaaatctcgcaggaacatttttttctgctattctcacagcaaaaccttcggctattgctgttttaccaacaccagcttcacctatcaatataggattatttttagttcttcgatttaaaatttggatgagtctatctacctcgcgttctcttccaataacagtatctatttcaccatttttagcctttaaggttaggtttattccataagaatcaagatatttcttctttttgttttttttatgggttttatcatttttcgtattattatattcagaatttttattttcaggctgttcagaattattaaaggcattattaaaaaagtttaatagtccaccaccgtttccgctttcatctgaaactttatctaaatcaatatttttaagcatatcattcatttgactgcttaaattttgaaaatcatcttccttcatatcctttgtatcgattatttgtgtcaaaggcgagatacctagtttttttgcacaaggtaggcacaagccaactaattcctgtttaccgtctattactttatttgtaaatataactgcaacatttttcttacatacagaacaagtaaccataagtattatcatctccaatgtttcaagtttataacaatcaagtttatgtttaattatattatatcagagaaaagagaaattcatatattaaattgattaaaaaaatttataatatggtttataatataatatagtatagattattccaattggaggagttaataatggagaatcatgatttagtgattgtgggtggcggtatatctggattacaagcagccatttctgctaaaaaatcgggagtgcaagatatagtactaattgaagcagaggatagcctaggtggcatattgaatcaatgtatttatactggttttggaatggaggattttaaagaggagcttacgggaacagaatatgttcaaagatttatagatgaatttttagagttaaatatagaatataaactaaatactactgtaattaaaataagtaaaaataaggttattacagctgtaagtcctaatgaagggataatagaaataaaagcttgcagtataatttttgcagctggtgcagtagaaaaacctcaaaaatctataagagtattaactaaggacttaagtggaatttattctgcgcttaccgtagggagatttataaatatacatggatatatgccaggcaaaagtatagttatactaggagcaaataaaattggtaatgctcttgctaatagaatatttattgaaggtggaaaagttaaagcagtgatagatagtgaggttggatttgatgaaagaaatgaaataatagaatttctagcagaaataaatataccttttctctacaattataatatagtgaaaataaaaggaagcgagaggatagaagggatttatatttcggatgaaaatggagaaaagtttatttcctgtgatacattgattttagcattaaaattgaatccaaatgataaaattttaagagaggctaatataaaaatattaaacaaagagagaaatgaaatcaatacaaatgtaccaggagtttttatagtaggaaatgctttatacatacatgaatctaatgaaggtagtcccttggagaacagaaaagctggagaaatgtcagcagaatatataagggctacattgtgatttatttattaatgaactatacttgtattaatatgaaggagatgaatttatgacacgtaaattattttatgatgatccatatatatgtgagtcagagggaaaaatagttgatgtattggagaatgatgggaaatacgagattgttttagatgaaactagtttttatccagaaggtggagggcagccttgtgatttaggaacaataaataatatacctgtagagtatgtttatgaaaaaggtgacacaatatatcatgtaatgaaggagagaccagaaggtaatactgctaagtgtaaggtggattttttaagaagacaggataatattcagcagcatactggtgaacatttgctttcagcggcttttttcaaattatataatggtgtaaactatggtttccacatgggagaagattatgtaaccatagatatagacatggaagaagtaactaatgacatgataaaaaagatagaggctgaagcaaatgcatacatatatgcaaatgttgaaactaaaacttacttcatgagtaaacctgaggctgaaaagcttcctcttagaaaggcaataaaagctgaaggaaaaataagaatagttcagcttggtgatgtagattatagtgcttgttgtggcacccatgttgtgagaactggagaagttggaataataaaggtactcagaactgaaaaatataaaggtatgacgagagtttattttaaatgtggtagaagagcatttgacgaatacagtaaggagcataacataataactaaacttcaaaaaaatctttcaatagatgaagataatattttaaataaggttcaaacaaccatggaggaaatctctaatttaaagaaaaagcttttagaatataagaaaaatgaggctaaacttgaagttgagaaaattaaagaaaaaaataataatggtgttatatttgagcattatgaagatggagattttagctttttagaggaaatatatgatggaattaaagatgaaaaggccgttattatattaacttcgggtgttgataatagaattttatttgcacaaaatggaattgatgatatagaatgtggaaagatattcaaggaaaatataaaggaatacaatggaagaggcggcggaaatgcaaaaagagctcaggcggctttttcaaataaggatgatcttaataagtttgcgaaattcttaagagaactaagctaaaaattgaggtggttaaatgaaaggtgtaattgaatattcattaaaaacttctaatgatgatcagtttattgatataacaaacttagttaaaaaagcagtagatgaaagtggtgtttcagatggtatggctgtagtattttgtccacatactacagctggtattactataaatgaaaatgcagacccagatgttactagagatattttagttaatttagataaggtcttccctaaggttggagactacaagcatgtagagggaaattcacacgcacatataaaagcatctttaatgggatcgagtcagcagatcattattgaaaatggtaagctaaagctaggaacctggcagggtatatactttactgagtttgatggaccgagagatagaaaagtatttgttaagataatatgaaataactaaatttagcggctttaatgccgctaaatttttaactatccattatatcttttatgacttctcctccgataatcattccagcaacgggaggaacaaaggatatacttgcaggtatttgtcttttggcggtacattttcttgaaccgtttgcacacacacatccttctttacaggttataacctcatctgattttggtttcataggcatttctttagaataaagaaccttaagagatttaacacctctttttctaagctcatgtcgcataacttttgcaagaggacaaattgaggttttatatatgtctgtaatttcaaaccttgttggatctaatttatttccagtgcccatgcaacttattatatttatattatttttttgacaccaaagtataagtgatatcttagctgaaacggtgtcaatagcatctataacataatttgtatctggtgctattaaatcgcttatgttatcttcagtaacaaaaattctgtgagtttctacctgacaattgggattgatatccaaaattctttctttcataacatctaccttaggttttgctattgttttaaaagtagcttggatttgtctatttatatttgtaaggcatacggtatcgtcgtctattaatacaattcgtccaactccagatcttgtaagtgcctctacagcataacttccaacaccgcctatgccgaaaactattactttactattctttaatttttctaatctttcttttcctattaatagttcagttcttgagagaaaatgttgacgcattcagttatctgcggttttaatttaaaacagcagatttttcaccaccttctaaataaaattataagttaataagctctctgatattttattttaaataccataataacatattaattttaacatttttttattttatatcaatataatatttcaataattattgtttaatatgtctacttatttagaagagaaatacttataaactataaagaaagcataaaaaattagcaattcagtatctgaaaaccattaacaacccagatagtatcaaatattgaagatatttattttgtcaaataagctcatgttatgttatattatatatgtattttttagcaaattattgtaaaatttatggttaaggggtggagaaaattgagtaaaagtataaggagtaagctaattataaccattagtttggtctgtatgattccgattataatatttggtgctatttcatatgagaatgtatacaatattttaatggaaaagttaaatggtgactctcaacaaagtttgacagaagtaaataggagtataaataattattttcaaaccatggagaataatataggaattcttgcaggaaattatgatatacaaaatgtaaatgatcatcctgattttgaagcatatgtttcatcatctcttcaagaaataaaagagaataacaaggatgcattaaatgtgtattttgcaagtaattctaagaagttgtatttgtatcccaaggttaatcttccagaaggatatgatccaacaactagagactggtacaagaatgcagtttcaggtcaaggaaaggtgatttttagtgaggtatatgtagatgcagctactaaaaatagcataatttccatatcaaaagctgtgtataataatgaaaagcttgtaggcgtggtttgcatggacgttgatttaagtaaattaagcaatgatatgaaaagtattaaaattggtagagaaggatatatatatataactgataaggaaggaactatgattgttaatccgactaaatcagaaataggaaagaaaaatataactaagtctagcatttgggataatattaatagtaaaaagtcaggttttattcagtataaaaatcaaggtgaaaagcaatttgtagtgtttaaagaaaatagcgaattaggatggaagatagtaggttctatgaatgagagagaacttacaaggagcacgtcttcagtattaggtacaactgtagttgtaataataataattttagctttggcagctattgtttctatattaataagtaagacctttacaaagaacataaacaaaatagttgaggttgctaagcttggagctgatggtgatttatcgcaaaaagttgatattacttcaaaggacgagtttggcaagatggctgattatttcaatgatatgatacaaaaaatacatgatttaataagcagaataaagcaatcttcggataacataatgagttcatcaaaaacaatattaactatgtcgagagaaactagcagtgctgtagatgaagttgcacaaactattgatcaagttgcgcagggggcttattcacaagcggaggatataacaaatagcgttaatgaatttaataaattaggtgacaaaattacatcaattaaaaacatgacagaaaatatagatgagttatctaaaaatactaatagtttaagtaaaaatggacttcaaataatggaggttcttattgataaaactatggtttctaacgattcgtctaaggaagtatcaagaactgtaaaggatatggttgaaacatctaatgctattggaaacattacagatactataaatggtatttcagagcaaacaaatttgttggctttaaatgcagcaattgaagctgctagagcgggagaagcaggaaagggattttctgtggtggctgaagaaattggaaagcttgcagaggaatcaacatcagcaacaaaagaggttaaaaaacttcttgaagatataaaaagtaaaaatagtgtagtatttaaatcaatagatgtttctctaaaattatcagaggaacaaactgaatcagttaaagagactaaagaaatatttaataagatattagagtctttaaatagtttagtaggagaaatagaaaatataaggggctctataaatgacacttatcagagtaagaactttatatttggtaagttagaaagcatatcagcagcatcagaacaatcagcatctagttctgaggaagtatctgcaactacagaagaagtatcagctagtatgagtgaatttaataagatgtctcaaaaattagaacaagttgtagaggaacttgagagagaaatacaaaactttacgctgtaattataatggagtaaaagatgattgttaacaagataattggttaatgaggttcatattggagaaatgacaactgaataagtgaagtttttagcaggtggtaaaaaatgtgcaaacgtaaagttttaactgtacatttaaaccatctgcttttatttttttgcgaaatttacttaaaatgcaattaaaaagaggaattgtacataatttttaataagaaaagagaaaactaaagtaaaataaagaaattacaagcatgaataataatgagataaatgtttatatgaataagtttatttcaataaatgtcaattttatattaagtttgaagtttgtaaagtaattaactataatttaaaatgtaaacaaaatataaattattgtaaagagtataatttactaaaattgcaattcattttgaagggacgtaaaaccattaatttaataaaagggggatgaaaaaaggggtttaagggtaattaattttgtttatatgtactgacaaaatgttttttgctaacagcttataataaatggagggttaaaacagtgaaaaaaagaaatattgccattctaggaatgtttatgatgacagcatctttaggtatttctaaaaatcatgtcttcgctgatacagtaaaagcaagcaattcgggtgttcaaatacaatttgctgatacaaatactagtacaaccatgaatactattgctcctaaatttaaaatcacaaataatactggagcacctttagatttaacaactttaaaattaagatactattttacagctgatggtactcaggatgaaaatttttggtgcgaccatgctggtatgcttaatggttataactaccaaacaattacaagtaatgtagtgggtacttttgtagctatggataatgcaacagctactgctgatcattatcttgagataagcttctcaaatggagcaggacaacttgatgcaggttcttcacttgaagttcaatgcagagttgcaaagaatgactggagtaattatgatcaatcaaacgattattcatttacttctaatgcaagtgattttactgactgggataagataacaggttatgttaatggagatcttgtattcggaaatccaccagtagtagacccagttattactccaactactgctacatttgatacagctaatccaactgatgtaaatgtagctatgcaattaaacggatttacattatcaggattaacagatgagaacggaacagctgttgatgctgcaaattatacaatatcaggaagtaacttggtattaagcaaggcttatcttgcaaaattagcattaggcaaacatagctttaattttaattttgctaaaggcactacaactataagtaaaccattagcacttacagttacagatacagcaggtataacagtagatcctgcaagtgtagtatttgataaagtagcacctcaagatgagaatgttgctcttaaattaaatggacatacacttggtgatgtggtaggacctaaaggaaaccttgtaaaaggaacagattatactgtagcagatgatggaactgtaacatttagtaaagcatatctttcaactcttccactaggtgatcagacaataacatttaaagctagtgatgattctactaaaacagcagcagtaacagttacagtgaagaattcaaatgctacaaatgttactgttggagatgttacaggagcaaaaaaaggagatactataaaggttcctgtaagtgtaagtacagtaaaaacaccaataggattaatagatatggaaataaactatgatccaacagagttaactgcaaaagatgtagttcctacagatttagtaaaggatactgataactatagctttatagtaaatacatcaactccaggtaagattagtattacatttacagatccaactcttggaacttatccaataggtacagatggaatatttgcatatttagaattccttgtagctggtgaaaaagcaggaaaatatgatttgaaagtaaacccaactacattaatacttgcagatgaaaatgataatgatatagattgtaacccaccaaaggatggaagtgtaactgttataggtactccagttgtaactccatctcaaataaatgttgaacaaggttcagcaactgatcagccagttaaaatagatttaaatggtaacacacttaaagatgttgttgatcaaagtggtaagactcttgttcaaggaacggattatacagtaacagatactggaatcacattaagtcaatcttatcttgcaggtttagccttaggtcaatacactctaacacttgattttaatggtggaggagcatcacagacaataactattaatgttgtaaagaatgaaactgtaaaattgtcagttggaacagtatcaggaaatccaggggatactgtaaaggtgcctgtaactataagccaggtatcaacaccagtaggtttaatatgtatggatataagctacgatgcaagtaagtttactgttaaggatgtacttcctaatacagatcttgtaaaggatactgataactacagctttatagtaaatacatcaactccaggtaagattagtattacatttacagatccaacacttgcaaactatccaataagtgtagacggaattcttgcatacttagactttattataaattcaaatgcaacagcaggagatagtgctttaacagtagatccagctacattaatagttgcagatgaaaatgataaagatataaaagatgcagcttctaatggaaaaataacagttacaggttcagcaccagttgttcaaagctcagtagtaaatacttcaagtgtaacttatgatcaaaatgcaccacaggatcaagctgttagtattactttcaatggcaatacagttaaggatgtaaaggacgcaagtggcaatacacttaaggctggaagtgactacacagcaacaagtgatggaattacacttagccaaagttatcttgctactttagcagcaggaacttacacatatacaattgattttagtgcaggaaatgcagggacatttactgttgttgttaaaggaaaaacagtagtaggtagtgcaactactttagcagtaggaactgtatcaggaaaagcaggagatactgtaaaggtacctgtaactatcagtaaagtaacaacaccagtaggtttaatatgtgcagaaatagactatgatgcaagcaagtttactgttaaggatgtacttcctaatacagatcttgtaaaggatactgataactacagctttatagtaaatacatcaactccaggtaagattagtattacatttacagatccaacacttgcaaactatccaataagtgcagatggaattcttgcatacttagactttatcataaactcaaatgcaacagcaggggatagtgctttaacagtaaatccatcaggatttatcattgcagatgaaaatgataaagatatacaggatgcagcttctaacggaaaaataacagttacaggttcaacaccagttgctgaaaattcagtagtaaatacttcaagtgtaacttatgatcaaaatgcaccacaggatcaagctgttagcattaccttaaatggtaatacaattacagatgtaaaagatgcaagtggtaatacacttaaggctggaagtgattacacagtaacaagtgatggaattacacttagccaaagctaccttgctactttagcagcaggaacttacacatatacagttgattttagtgcaggaaatgcaggaacatttactgttgttgttaaagcaaaaacagtagtaagtagtgcaactactttagcagtaggaacagtatcaggaaaagcaggagatactgtaaaggtacctgtaactataagtaaagtaacaacaccagtagggttaatatgtgcagaaatagattatgatgcaagcaagtttactgttaaggatgtacttcctaatacagatcttgtaaaagatactgataactacagctttatagtaaatactgcaacagcaggaaaaatcagtattacattcacagatccaacacttgagaaattcccaataagtgcagatggaattcttgcatacttagactttatcataaactcaaatgcaacagcaggggatagtgctttaacagtaaatccatcaggtttcattgttgcagatgaaaatgataaggatgtagatcatgcatcaacagatggaaaaataacaatcacaggttcagcaccagttgttgtaaattcgtctgtaaatacttctagtgtaacttatgatccagcagcaccacaggatcaagctgtcagtgttacacttaatggcaatacaatcacagatgtaaaggacgcaaacgctagtgttcttaaggctggaagtgattacacagtaacaagtgatggaattacactaagccaaagctatcttgctactctagcagcaggaacttacacatatacagttgattttagtgcaggaaatgcaggtacatttactgttgttgttaagggaaaagcagtagtaaataaaactactttagcagtaggagctgcatcaggaaaagcaggagatactgttaaggtgcctgtaactataagtaaagtaacaacaccagtaggtttaatatgcatggaaatagattatgatgcaagtaagtttactgttaaggatgtacttcctaatacagatcttgtaaaagatactgataactacagctttattgctaatacgacatcagcaggaaaaatcagtattacatttacagatccaacacttgagaaattcccaataagtgcagatggagttatagcaaatatagattttgttgtaaattcaggtgcagcaactggtgatagcgatttaacagtaaattcatcaggtttcattgttgcagatgaaagtgatacagatatagatcatgtatcaacaaatggaaaaataactgttgaataatcaatgacataatactgccgccattataggatagcggcagtatactataaaattttaattaattatttttaaaggagatagaaaaatatgttaaagataagtaagaattttaaaaaaataatggctgtagctcttacatctacagttatatttggttctctatctggattattaactaataaagttgcagctgctacaactacagattcatccttaaaagtagataatgcgtatactcaaagatttgaaacaatgtacaataaaatgcatgatgctaataatggatatttcagtaaagatggtgttccatatcactcagttgaaacctttatggttgaggcacctgattatggtcatgaaactacaagtgaagctttcagttattatatgtggcttgaagcaatgcagggaaaaatcacaggaaactttagtggagtgaataccgcatgggatacagctgaaaagtatatgattccatcacaccaagatcaaccaggtatggatagatataacgctagtagtccagcaacatattcaccagaatgggaagatccaagtaagtatccatctagaatggatcaaggagcagcaaaaggacaagatccaataagtgatgagcttaaatcagcatatggaacttcagatatgtatggaatgcattggttaatggatgttgacaactggtatggctttggaaatcatgaagatggaacatctaaaaatgtttatataaacacttatcaaagaggagaacaggaatctgtttttgaaacagtacctcaaccatgttgggatgctttcaaatatggtggaaaaaatggatatcttgacttattcacaggagataatagctatgcaaaacaagctaaatacacagatgcaccagatgctgatgctcgtgcaatacaggcaacttatgaagcagcacaagcagctaaagaggatggagtagatttaagctcaatcgtaggtaaagcttctaaaatgggagattacttaagatatgctatgtttgataaatattttagaaaaataggaaattcaactcaagcaggaaatggtaaagattcaatgcattatttactttcttggtattatgcttggggtggatctcaaaataatgattggtcttggaaaataggctgcagtcacagtcattttggatatcaaaatcctttaactgcatgggtactttcaactgatagtcaattcaaacctaaatcagcaactggtgcaactgactgggcaaagagtttaacaactcaggtagatttctatcaatggttacaatcttcagagggagctatagcaggtggtgctagtaactcaaatcatggtcgttatgaagcatggccagaaggtacagctacatttgatggaatgggatatcaagaagaaccagtttaccatgatccaggtagtaacacatggtttggaatgcagtcatggtcaatgcagcgtatggctcaatactactatcaatcaaaagacccaaaagcaaaagctttacttgacaaatgggttaaatggattaaatctgtagttaaagtaaatccaaatggtgcaggaacatttgaagtaccatcaaaattaagttggactggacaaccagatacatggacaggatcttatacaggaaatcctaacttacatgtaaatgttgattcatatactactgatataggtacaagctcatcaactgcagatgcacttgcatactatgcagcagctacaggagataaggattcacaagcactttcaaaaactatacttgatgatatctggaaaaactatcaggatgcaaagggtgtatcagcaccagaacaaatggactatagccgtgtattcaatcaagaagtttatatcccacaaggttggacaggaacaatgcctaatggagatgtaattaaatcaggaaataaattcatagacatacgttcacaatataagaatgatcctgattatgctagagttaaatctgatgttgaagcaggaaagtcaagtacatttaactatcatcgtttctgggcagaaagtgagtatgctatagcaaatgcaaattatggaactttattcgctaatacagctacaccaggagatgtaaatggagacggcgtagttaatggaagagatcttatggagcttagacagtatttagcaggtaagttagatgctagtaaaataaatttagctgcagcagatgttaataatgatggtgtagttaatggaagagatattatggaacttactaaattaattgcaaaataggttagtagaatcttaatttatgggagaagtgtttgatatgaaaaaaaaaagttttgcttaagtgctatttttgcatcgttcatggcagcatgtcttgcatttggtaatgtagcctacgcagatgatgttaatgtaagtaattctaacgattatcttcacagtgatggaagtaagcttttagatgactatggtaatcaggttagaatgactggtatagcttggtttggacttgagactccaaattactgttttcatggcttgtgggctaataggcttgacaatattcttaatatagttgcagataatggatttaacactcttagagtgccattatctgttgaacttgtaaatcagtggcgtcaaggagtttatcctactccagattcaataaacgattatataagtcctgaattaaagggacaaaatagccttcaaatacttgatgatgtcatagcttatagtaaaaaagttggcgtcaaagttatgctagatatgcacagaattgaaagtggtggacagacagctacttggtatacaagtaaatatactacagatgactatgaaaaatgttggcaatatcttgctgatcgctataagaacgatgatacggttatagcagcagatatatttaacgagccacatggaaaagcttatagagcagaaacttctgctaagtggaatgatacaacagatgaagacaactggagatacgaagcagaaaaggttggtaaaaagattttagatataaatcctaagatgctcatagttgttgaaggagtagagacttaccctaaagagggaacagcagctggaagtacaaatcctgatgactactacggtggttggtggggaggaaatctaagaggtgttaaagattatcctgtagatttagccccatataaaaatcaagttgtatactcgccgcatgattatggacctggtgtatcagaccaaacatggtttgatggtgactttacagaacaaagtcttttgaatgatatatggcgtccaagctggttctatatacaagaaaagaatatagctccattacttataggtgaatggggaggaaatatggacggaggaaagaatgaacagtggatgacagacatggctaaacttatttccgataacaaaatgaaccatactttttggtgtctaaatgcaaattcaggtgatacaggtggtattcttgaatatgatttcaaaacaatagatactaaaaaattagctttagtacagcctacattatggaaagacgatgctagtggtaagtttgaagggttggatcatgaagtgaatttgggtaaaaatggtacacatgtacaacctacgacaataataaaggttcaaaaaggtgatgttaacggcgatggtgcagttaatggaagagatgtaatggaacttagaaaatatatatcaggtcaaataacaactataaataaagatgtagcagatattaatggtgacggagtaattaatggaagagaccttgtagagctcataaaaatgatatcaaataaccaataataaaattaaattaggatgtaccacttcaaaattttataggaatttgaattgagaagtggtatatctttatttacaaaataattttagttaccatttataaagatttggtggtgaaaatatatggtaaaaaagagattaaaaagtttaatagcagtttttattacgacagctatgatgggcggatttatgaatttaacagatggaaaagtaatggccgatgaaactaatacaaattttaattatggtgaagcacttcaaaaatccttgatgttttacgagtttgagcgttcaggtaaattaccacaagataagagagataactggagaggtgattcgggtttagatgatggtaaggacgttggattagatcttacaggaggatggtacgatgctggtgaccatgttaaattcaatcttccagcgtcatatacacttacaatgctaggttggtctttatatcaaaatagagattcatatgaaaaaagtggacaactaaaatatttgacaagtgatatgaagtggtgtagtgattttttgatgaaatgtcatccagctcctgatgtgttttattatcaggttggagattcaggacttgaccataaatggtggggaccagctgaagtaatgcaaatggatagaccatcctttaaggtagatgacgataatccaggttcagcagttacagcagaggcatcagcagctcttgcagcaacagctttaaattttaagaatgatgatgcagattatgcaaataaatgtttgagccatgcaaaggatttgttcaattttgcagataaaactagaagcgataaaggatatacagctgcaaatggctactatagttcaacatcgttctatgatgatttgtcttgggcagcttgctggctttatatggcaacaaacgataaaagttatttagataaggcagaagcgtatgtagataactggagcagagaacagcaaacagatattatatcctataaatggggtatgtgctgggatgatgttcattatggagcgcaagtacttttagctgagcttacaaataagcaaatatacaaggattcagttgagagaaacttagattactggactgttggatatgatggcaataaagtacaatatactcctaagggtttagcatggataagttcttggggaccattaagatattcgttagcgactgcatttttagctgatacttattcaaaatggtctggttgtgatgcaagtaaagctaaagcttacgaagattttgcaaagagtcaggttgattatgcacttggaagcagcgggagaagttatgtagtaggatttggtgtaaatcctccagagcatccacatcatagaacagctgaaagctcatggtttgatgataaaactgtaccaggctacagcaggcatacactttatggtgcaatggttggaggaccagatcaaaacgacaaatttgatgatgatgttgctaatttcaatcaaaatgagccagcttgtgactataatgcaggtttagtagcaacactttcaagtatgtacggtaagtatggtggaaagccaatagataattttaatgctattgagaagcctactaacgatgagttttatgttgaagcagcagtaaatgcaacaggtaaaaattttgaagaaataaaatcaaaaatatacaacaagacgggatggcctgcaagggttacggataaattatcatttaaatatttcattgatataagtgaatttgtgaaacaaggatataaagcaagtgatataaaggtaactacaaactataatgaaggcggaactgcatcccagcttataccttgggatgaaaagaacaacatatactatgtaaatgtagattttacaggaacaaagatatatcctggtggtcaatcagcatacaaaaaggaaattcaatttagaatgacagcaccagataacgctacttgggataattcaaatgatttttcatacacaggagttgaagaaacacctggagatactccaacgctagataaaaatattccagtatatgatgctggcgtaaaggtttatggtaatgagcctaagggaaatgtagtagttggtgatataaatggagatggagaagtaaatggccgtgaccttatggagcttagaaaatatatagcaggaaaaactacagatataaataaggattctgcagatataaatggagatggggtaataaatggtcgtgaccttatggagttaatcagaaagatttctagtgtgaatccttaaatcttataagaaaataacggaaggaagagtattcaatgaagaaaaaaggaataattacagcagtaatattgagtttactagttattggtacggtaggttgtaaatcaaacgacacaaagagtactgtatccgctaatcttgtaagcagtgaaaagtctaatttaaagataagcagtagtagcggaaaaacaggaagtaatgtggaggttaaagttaaggcaagtaatgtagctaaaaagaatgttatttgctgcgattttaaaataaaatatgatgctagtaaattagacgtttctggtatttcaccaggagaaattctaaaagatcctaaagataaccttgagtacaatgtggatagcaaaaatggtgttattacaattttatattcgtactcagataaaaatataggaaaagaattgatatcaaaaaatggggattttgtaactttaaacttgaaaataaaagatgatgctaaaaagggaaaaactcaaataagctttaatggcaatcctgaattctatgataagaatcaaaaaggtgtgtcagttactactaataaaggtgaaatagaaattaaatagggggagcttaaaatgaaaagaaataaaattttagtgtctgcattggcaatagctttttcgtcaatggtacttacacctgtgagtgggttaaaagtttttgcagatacagcggatgtaaatgtaaatattgatacaaatgctgaaaaacaagctataagtccatatatatatggtacaaatcaggattttagcaatgctaaggttacagcaagaagaattggtggaaatagatctacaggatacaattgggaaaataatgattcgaatgcaggaacagattggaagaatgaaagcgataattattggcttacactttatgatgttcctaaggaaaagtataatgagccagcttcagtttatacagctttccatgataagtcacttgcaatgggagtaccatactcacttgtaacacttcaagcaggtggatatgttgcagctgatcagagtggtcctcttgcaaatacagatgtggcaccatcatcaaaatggaaaaaagttgagtttaataagaatggcccattatcacttacgccagatacaacagatggctctgtttacatggatgagtttgttaactatcttgtaaataaatatggaagtgcatcaggttcgaaaggaataaagggatattcattagataacgagccttcactttggccaagcacacatccacttattcatccagataaaactaaatgttctgaagtattggataaggatacgcagcttgcacaagttgtaaagaaaatagatccagcagctgaaacctttggaccagcattgtttggttttagtgcatttaacgatttcaatagttcacctgactggagcagtgttaaaggaaattatcagtggtttatagattactatcttgataatatgaagaaaaactcagatgctgcaggaaaaagacttttagatgcattggatcttcattggtatccagaggctaaaggtggcggacaaagagtaacaactagtgatacttctaatgtagattgtaataaagcaagaatgcaggctccaagaagtttatgggattcaacttacacagaggacagctggataggtcagtggtgcaagtggggattgccactaatacctaaggttaaatcatcaattgataaatactatccaggaactaaactatcattttcagagtacaactacggcggagaagatcacatttcaggaggaatagcacaagctgatgcacttggtgtcttcggtaaatatggagtttattttgcaacttactgggaatgtaatagtgacaaaaataattatgtacaatctgcttttaatttgtataacaattatgatggcaataactcaaagtacggagatacagatgtaaagtgtgatacttcagatattaacaatagttcaacttatgcttctgtaacaagtaatgatggcaataaaatggatataattgtaatgaataaaaattacacagattcaattaattttaatttcaatgtaagtagcaataaaaactatacatcaggtcaagtatggggctttgacagtaatagctctaatattactaagagagatgatgtaagttcaataagtggaaataagttcacatataaaataccagctcttactgcagttcatattgttttaactactgctcaaaaaagtagtgtaaaaggtgatgtgaatggtgatggtgttgtaaatggaagagatttaatggagttaagaaaatatttagcaggaagtacatctaacatagacttaaatgcagcagatttgaataatgatggtgcagtaaatggaagagatcttctggagcttataaagcttgtttttgaaaaatagtaaattattgcatgtaaagggggaatatgcatgaagaagttgttagctactttggtaacagttttcatgatatgcatgcagataacgcctgttcaagcagctaagagtacagaggataaaaactataattatgtagatgctttttctaagtcaatattattttatgaggctaattggtgtggaccagatgcaggaaataatagacttaaatggcgcggtccatgtcatgaagatgatggaaaagatgttggacttgatctaactggaggctttcatgatgcaggggaccatgttaagtttggtttgccacaagcttatgcggcatcaactttgggatgggcttattatgaatttaaagattcctttgtaaaaaaaggacaagataaatacatgttaaatatattaaagcattttacagattattttcttaaatgctatcctaataaaactactttttattatcaatgtggagatggaacaacggaccactcttattgggggccacctgagctccaaacacttgatataactacaagacctactctatacgctgcaacaccagataagccagcgtcagatgtgtgtggaagtacagcagcagctcttgctcttatgtatattaattataaagacgtggatgctgagtatgcaaataaatgtcttacagcagcaaaggatctttatgattttggaaaaacttataagggcttaagtgagagtggaggcttctacggttcaactggatacttagatgatctttcttggggagcagtatggctttatgcagcaacaaatgataacagctatatgacagatatagattcctttttaacagcaaagggaattggtggagataacagttattcaaatcactggactcactgttgggatgatgtttttggaggtgtttttgtaaagttagcacaacttacaaataatcccaagtataaggctatagctgaagaaaacttaaattattggattaaagacgctccaacaactcctggaggattaaaatacattgcctcttggggaaccttaagatatacagctgcagagtgtatgcttgcacttgtgtactacaaaacctcaaaaaatgaagaatatttaaattttgcaaagagccaaattgattacatgcttggaagtaatcctagaaatagttcatatgaggtaggctttggaaacaattatcctaaaaatcctcatcacagagctgctagtggaagaatggaaggagctccaggttatgaaaaaaagacagatcctgaaaaacacttgctttatggagctttagttggaggtccagatggcactagtgatgattattctgatgatgtaaatcagtatgtgaattcagaagttgctattgactataatgctggatttgtaggcgcacttgcaggtatgtctaattactatggaggagataatcttccagaagatgtacctggtattgaggcaaactcaccacagtactatgttgatgcaaatataatgaaggaaagcaatgaagaatgtacaatacaagcatttatacacaatgcatctcttcttccaccacactatgaaaaaggtatgtcctttagatattatgtagatttaagtgaattatataagaaaggatatactgtaaatgatgttggggtaagagctaactatgcagcaggagggggaaccttatctggttttattccttatgatgaagctaagcacatttattatgttgaggcttcatggccaggacaactatatggaaaagctgaaatgcagtttgctataacagcttataatgcaaaatgtcttgatgcatcaaatgatttttcaagacaaaatcttaagagtgacagtacaaatatttcggagaatatacctgtatacaaaaatggagtaaagatatttggaaatgagccaggttcagttgaggttaagaccggtgacgttaatggtgataatactgttgatggaagagaccttatggagcttagaaagtatcttgcaggaaataatccaaacataaacttaaaagcagcagatttaaatggtgatggtatagtaaatggaagagatttagtgattttaattaaattaatttcaggtaaacagtaagctgctttgctcgaatcagattgtataaattaagtagttttaaagggggattttatatgaaaaagctcgtggcttgcttaactatggtgttacttttgggaacgcaaatcaagccgttaacgataacagcagataccaatgatcaaaaacataattatgtagatgctttttctaaatcaattatgttttatgaagctaattggtgtggagctgatgccggaaataataggttaaagtggagaagcggctgtcatgaaaatgacggtaaggatgttggtcttgatttgacaggaggttttcacgatgcaggagaccatgttaaatttggtctgccacaggcgtattcagcatcaaccttaggatgggcttattatgagttcaaggatacctttgtaaaaaagggacaggataagtatatgcttaatatattgaagcattttactgattatttcttgaaatgctaccctgataataatacattttactatcaatgtggagatggaaatactgaccattcctattggggaccacctgaacttcaaacaacctctagacctacgctttataaggcaacacctagtacaccagcttcagatgtatgtggaaacacggcagcagctttagctcttatgtacattaattataaagatgtagattctgcttatgctaataaatgtcttacagcagcagaaaatctatataatttaggaaagaactacaaggggatgagtcaaagtggtggtttttacacatcatcgggatacttagatgacctttcttggggggctatatggctttacgaggcaaccaataacaacaattatctaagcgatgcacaatcttttcttcaatccgctaacataaatgagtattatcaatataattggacacactgctgggatgatgtacttggaggagtttttgtaaaaatggctcaaataacaggtgatgctaaatacaaaaacatagttaaaggaaacattgattattggacaaactctgttactactactcctggtggtttgaagtttagaacaggttggggaaccttaagatatacggcagcagaatgtatgctagctcttgtgtactataagacgtcaaatgacagcgaggctatgaatcttgctaaaagtcaaattgactatattttagggactaatccacagggaatgtcttatgaagttggatttggtagcaagtaccctaaatatccacatcatagagccgctagtggaagaaacgaaagtgctggtgaaaagaaaactgaacctgaaaagcacattctttatggagccttggtaggaggaccagaccaaaatgatagttatatagagaatatagaagaatatcagcattcagaggtagcaatagattacaatgcaggttttgtaggggcacttgctggaatttcaaactattttggtcaaaatcaaagtgtagaaaagataaatgatccagatgtaaaagacagcaatactactaataccattttgggagatttaaatgatgatggagtagtaaatggacgtgacatagttatgatgaggcaatatttagctggtaaaacagttagtggtattgataaaaatgctctagatataaacggtgacggagcagtaaatgggcgtgacttaatggagctcataaagaaagtcagtaacaattaaaatggagatgaaatagaatgaaaaaactaaaagtgatatcaactgttgttgcgggagtgtttttaagcaccttagttagtttttcaagtataactaaggtaaaggcagcagacactacagataataagccaggaataaactggatgaatggttctaagtactttcctttaggtgcaaactatgcttgggatgaatgggataatgactttaatgataatggatggactacaagatttgcaaaaataaaagcagattttgataatatgtcagctcaaggaatacacacagtaagatggtgggtgttctgcaatatgtacgcttctccattattttcttcacaggatggaaaaggagtttgtactggtcttccagataagtggactgatcatatgaaagaggctgcagattatgcttattcaaaaaatatgaagatatattttacacttactagctttgacgtagctaaaacaaataatagtttttatcatggaagtataatagatgatccaactattcgtaaaagctatatagataatgcagttacacctgttgttaaagcacttggagataatccaggagtaatgggttgggatgttataaatgaaccagagtggacaatttctagtgcagatggaggcaatcctggagactcaattaaaggatggtcattaagtacacttagatcttttgttaaagatgttgttgattgtatacatcagtatgctaaacagccagtaagcgttggttctgcaagcttgaaatggcttggagagcagtacgatttttggtcgggtcttggattggatttttatgatttccattggtatgactgggcaacaccatatttcaatccacttaaaactccagtatctcagttaaaagcaaagtttgacaaacctgtaataataggagaaatgatgccagatacacagaattcttcacttaaaatgtcacataagcaggtgcttgatggcttagtaaacaacggatacagcggatatatgctatgggcatggactgatgcttcagtaaattgtgtaggtaaaacagctcctgattttgatgaatttaaaacagaacatccagagcttcctatagatatgccaactatgcctggattaaaaggtgatgttaatggtgatggggtaattaatggacgtgatcttatggtattaagacaatacttagctggtcaaagtgtaaatataaataaggctaatacagatgttaatggagatggagtagttaacggacgtgatcttatggaaatagtaaagattgtaatgtcaaaatagagttatttaaaataaactaatgagataacaggtgatgttttagacatctctgttatatgtaaaatgaaatggaggaacttaaaatgaataaaaggattgttagcatggttgcaggacttagcataattttcacaactggttttgtaacacatataagtgcagcagctaataaggcagcagcttcagttcaaagccaaggatataagtgggataatgcaaagataggtgctggtggatatgttccagcagttatatttaataaaacagaaaaagatttaatatatgctcgtacagatatgggaggagcatatagatgggacaaggctaataataagtggattccaattactgatggattttctgattggacaatgcttggctgcgaaagtatagcaactgacccaatagacactaatcgtgtttatatagcagcaggtttgtacacaaatgattggcaagatgaaaatgcatatattcttagttcacaggataaaggtaacacatggaaaagataccaacttccatttaaggtaggaggtaatatgccgggaagaaatatgggagaaagacttcaaatagatcctaatgatgataaaatactttatcttggagctagaagtggtaatggactttggaaaagtgaagactatggacaaacatggtctaaggttgataatttccctgatacaggcgactatgtacaagatcctcaaaatgaatatacagcagataaagttggagtagtttgggaaacctttgatccttcaacaggaacaaaaggaagcccaactcaaactatgtatgttggtgcagcagataagacaggaaacaatatttacgttactaatgatggaggaaagacatggagtgcagttaaaggacagccaaaaggatatcttccacatcatggtatacttgcttccgatggtatgctttatatatcatatagcaatacttgcggaccatatgacggctcagatggacaagtttggaagtataataccaaaacaggagaatggacaaacataactccacctgcagtaggtgacactaaatctggttttggaggaatatcagtagatgcacaaaatccaaataatgttgtagttgcaactttaaatagatggtggccggatgaagaaatatacagaagtacagatgcaggtaagacctggaaacctatatgggattggaatggatatccaaaccgtactttgggatataacttagattactcagcacaaccttggcttgattggggtaagaccggggtaacaccaccagatccattagttaaattaggctggatgatgggagacttagaaattgatccatttaactcggatagaatgttctacggtacaggtgcaactctttatggaactgatgatttgactaattgggataaaggtaagaatgtagacatctctgtaaaggcaaatggaattgaagaatgtgcagtaaatgatgttgtagtaccaacaaaaggcgcacaacttttaagcgctgttggagatgactgcggattttatcatgatgacataactaaagttccaagtaaaatgatgacaacacctaactttagtgctacaacaagcattgattatgcagaaagtgttcctaactttgttgttcgtgttggaaatgttgatactagtaaaaatcaacaagataaagattgtggaatttcctacgatggtggtaagaactggttctcagctggaagcaatatatcaggagtttataaagcaggaactgtagcagctggtgctgatgctaaaactatagtatggtctccagaggaaggtgctaatgcagcatatagcacagataatggtaataaatggacaccgtgttctggtcttccacagggagcaaaggttagatcagaccgtgtaaatccaaagaaattctatggtttcttaaatggtaaattctatattagtactgatgcaggtgcaacatttactcaaagttcacaaacaggtcttcctacaaaaggcaaaggaatctttaagactgttataggtcatgaaggtgatatttggattgctggaggaaaagacggattatggcattcaactgattctggtgcaacattcacaaaagtatctggtgttgatgcttctgatacagtaggtcttggaaaatccaaaacagatgatggatatccagctatatacatggatgctacaattgatggaacagcgggaatattccgttcagatgatgaaggtgcaacttgggtaagaataaatgatgatgctcaccaatatggttccccagactactgcataactggagatcctaacaaatatggacgagtttttgttggaactaatggaagaggtattgtttatggagacatagatggttctcaacctacacctacaccaagtgttactttaggagacgttaatgatgatggaataataaatggaagagacgttatggtacttactcaatatatagcaggtaaggatgtaacaatagataaaaaagcagcagatgtaaatggtgatggaactgtaaatggaagagatcttatgactttaagacaatatatatctggaaagataacttcattttcatcaacaaaataagaattaaaggctggggtaaaaatttacctcagtctttttaattaaaataaagaaccgttccaggcccagtttgaaacctcatcaacagttatatatatacaatccttaggtattgaaagctcattttccatcaaagaagatattgcagaaaccaatttattttttgaagccttatctgctgagccaaatattttaacttcaataaaagcagccttatcttttttctcccctttaaagtaaagtggataattatccttaaatccaaccataagccaatcttcactttttccaggaagcagctctattatttttccaagctctacctttagtgtgctttctttttctttgtctaacttaacagttactgtagaatttataaatggcatataaaatcactcctaacataaaatatattacttttaattagattttacatattgtaataataaagtcaagtaaataaaataataattaaagttagagttgtatttttgctaaaggagattagagaatgatcactatagaaaaacaagaagagtttttaaaaaagttaataggttatagaagagaattgcataaacatcctgaattatcaatgaaagaatatgagacaacaaagagaattaaaaggtggctttatgagaatgacataaaggtattagattttcctattgaagttggtgttgtagcagaaatagaaggtgaacatgaggggaaaacagtagcaattagagcagatattgatgcacttccaatagaagaaaaaacagaacttccgttttcttctgtaaataagggtattatgcatgcctgtggacatgattttcatacagcagcaatacttggaacagccataattctaagtaaaagaaaagctgaaatttatgggcgtgttagaataatatttcagccaggagaagaaacaggtaagggatcacagtatattatagaggaaggcgtacttagagatgtggattgtatatttggtatgcataataagccagatttgcctgttggaactataggaataagatctggagagcttatggcaagtgttgatagatttgaaattaaggttattgggtctggagggcatgcaggaatacctaacaaatgcattgaccctattgtagtagccagccaaatagtagcttcaatgcaaacagttgtaagtagaagcattagtccaattgaaagtgtggttataagtataacaagatttaattcgggaaccacttggaatgttatttctgatagtgcagaaatggagggaacagttagaacctttaacaataacatacgtgaagaaataagaaatttgatggagaggacagctaaaggaatagcaagagctttaggaggaaaaatagaatttaaatggttttcctattcaccagtattagaaaatgatgttaggtttaaggacttatgtattgaagcagctgaggataatggttacaagtatgttgaagctaagagaaatttaggaggagaggatttttccttttatcaaactgtagtgccatctttttttgtgtggatgggagttgatggaacagaagagtggcataaagcaaattacaatctaaaagaggatgcgctaatggttgcagccaactattttagtgatttagctctaaaggttctttcaaaaaaataatagtaatatagtaataaatatttcaagagacaaatactacagtaataaaatttgtctcttttttagttaaagtatattaacgctaagtttaatttgaataaaaaaatacaataaaatttattaaaaaaaggatattaaggatagatattaaaaaacaatggtgttattatatatagttttcatgaaaaacctatattttgaagtttacatagaaatagttattgaaagattagaagtatataaaggttttagttataaagtacagctaagactttagtggaggaagaataatggcagataaaattaaagttggtgtaaaataactagtaaatgcttcagatatgtttgataaggcggctttagaatgtgaagatataaagaaaagtatagaaaaatcaacaacacaattaattgattcatggtatggagaaagttgtacggcttttgaaaaaacatatcttattttagatagaaagcttaatacatatacggaaatattacaagaatactctaaagctttatatgatatatcagaaacttatcaaaatacagatggtgatatagcaaaagctatgtcaaaggctgtaaatgaagcaagtgaacaaaaatgagtggaggatatgaaggaagcacagcaaaagtcggattacactcaaaagagagaggataatgctgttaattcaagttatccacaatatcctcaaaattaaatgaacgctggttattactaaaacacttaaagaggatgattaaatattagtaaaataaataaagttagtaaaattggaatttctacaggggaaatgcaaagtttaaaagtagatatgagaaatggacttttaaaaataaatgaggcaaaacaggggttaaaatcagcagtagataaattttcattaaaaaataaatcaaggtctatagaaatagagttaaaaaatttgaagcgtgagttgaaagcagtaaatcaattagaaggtgaaataagaaaaataaattcaaacatagattatatggtaaaaagattcactgatgtagataagaagtgtgcaagtaagctaaagacgagtggttatacttacagaaaaaaagttggacttttaaatttcggggaagaggtagaaagggtaccagttataggtggaattggtgtaccaattgatgctgtggagtcgtgggttgatagaaataaatttgttcttaaaaagacaactactataacattggaaacaggagcaattggggtttgtattgttacattgccggaggcaggaataacttggaaagcttgggatgcattgagtgctgcaggaggagttatgagtctagataacataggtacggcagcttcagctatatatcaaagaaaagtagaaagaaaaagtgaagaggacagttctgggtatgatctttttcaaagtatttttggaggagcaggatggtatagtgctaaaattttaggcgttaaaaatccttcttactggtgtagctctggaaagacgttgtatgataggacgtctgcaacagtaacagttttaaatgtgggacatagtgttacatccttgggaaaggatgtagaaaaattacctgctttaaaaaaagcagaagcatcaagtgctaataaaaccttagaggcagctaataatgctgaaaaaatacatatggatgcgatgatggctactaaaaataaaattaatggaatcaataatgcaaaaaaggaggtagtggatttaaaaaaacttaaaaagaatgtaggtaagacaaattttgaaccttataaaaatcaattttataaggataaaaatttattaaagaaggatggaaataaattgcctcagcttcagcaggacttattaattcagcaggatcagcttgaaacttttgaaaaaaatacattaaacgcaaaaaataaatacaacaaaagtattagggatttaaataaaaattatagggatataaaagctagtttgtataatataccagcagggggaactttatataacacagaagatgtacaaggcagttttcattttaattattttccaggtgaaatcaagccaatttttgaggaaataaaggtcgtactagggggagaaagatgataagatttcaaaagagaatggcaatattttttttgacaataagtatattgatcatatgtggagatattgaaaagattataagttttggaatagaatttgatgatattttatgcaatctgttttttatagggttgggaataatagggttccgtatctataggtggtataaaagacaaataaaaaaatacacagaactgttgaaagaagatagattagataaaattgaatacattatatatgatattgaaagagtgagaggtgtagtatataatacggcattttacattgatggtgtaaaatgtaagttaagatttccgcaatataaatgtaaggataatgacaattatgaatattatcttgagccaatatataaaaaaaatggtgagtttaaagattttatagcttatgcagataaaaaaaatgattataaaaaaagtatagaatctactaatgaaattacagaatgtgaagagaaagcggaaaaaaagcgtaaaagaaaaagattgaatgaatatgtaaatagcagaatggagctagcaaagaagtatgaagaggaagcaaaaaataaaatgtagagaattagtctacatccagaattaaattaaacatacgtaatgaaggaaaagcttagtaacaaaggagaaaatactatttatggaaaatgaaaatgttttaagagcacaggaattaaataatagaggattaatatttattgaaagaaatgctggggatgaagctttaaagtattttaataaggctataaaagaggatgaaaattttaaagaagcctatttaaataaggcagcgctttgcttggctatgaacaaagtcgatgatgctgtgagttgttatgataagcttataataaagtatcccaatgaaggaaaagcttattttggaaaaggaaatgtaatgtttttttataaagataatataaagaaagctatagaactttacaatagatctatttatttgggagaaatgagtgagggagtatattataatttagcactttgtatggagtcaattggagaattagatgatgccataaagtggttaaatagggcattaataataaatgatcaaaatataataactctaaataagaaggctgcagtgttaattaaaattaaaaaattctacgaagccttagagtgctataatagagtgcttaaaattgaagtagataatgaagaagtatatcattttaaggcgatgcttttgggtgagatgggcaaaatagaaaaagcctttgagactataagtaggggagaagctctattaggtgaacaaatgacattatgctatgacaaggctgtattgtttgaaaaacagaaagagtttgaaaaagctttggaatgcacagaaaaagcattattatttgatgaaggtaatgttctattaatactaaaaaaaggagatttgcttacctatctaaaaaagattgatgaagcgaaatcaacatatgataaaattttagaatttcatgagaataatatggaaggtgtttttgcaaaggcaaacctgtgcatgttattaggagaacatgaagatgcagaagaatttttcaaagaaataatagaaagattaagtggagaggaatctgttttaattaattcgtactattatagagctttgaatttgaaaaaatgggcaaaaacgaggaagcaaaagaggcttataaggaagcaataaaaaagtataacttcttaatcatcaaatatccatatgatgttaagttgaatttttttaaagcaaattgtttgagggatatagaagattatgaaaaagcagaagaattgtatgagtatataattgacttagataatgatgctttggaagtatatttgatgagagcgagaaatagaataagtctaaataaatatgaagctgctaaagaagatttgaacacagttataaaattaaatccagcatataggaaagttatagaattagatgaacaattaaaggaattcttaagtggtaaaagtgaaagttgttatagataaaagatttgtaggaggttaaggatgaattctgatgaaataagaatagacgagaaggcttgtgatgatgtaataaaggatttaaaagcagttggggaaaaagttaaagagacatataatttgattcacttatccaataggcatatagaagatggaataaaaggaagtgcagtggattctattaccactgagtataataagatagttaaaatggtaaaagaaatgcaggataatatgggtaatgatgtagcggctgtaaataatatagtgtcaagctttgatgcagaggataagatgattaaaacaaagttttatagatagtaataaatgatacatatgtagaaaaagatggagtttaatggtagatagatgtgatattgaaattgatgcaagtatttttgaagaaaccataaaagtttatagcgatagtaaagttagattgcatgatattttatgtgatttagaaaatgaattacgtaaaatggaagatacatgggaaggcgatgctaaaaaagaatttgattcaacgtttcctggattttatagtgcaatgaaaaaggactgtgatatgttagaggaactgataaaagaattaaagttagtgaaaacaagctttgaaagtttagatactgagatgaaaaatttagataaaaaataaaaaaatataaatacttaggagataaaatgattaagaactgaaaaaaaattgacaaaaattttaaggatagttatatgttgaggttaaagatgggagttataaatttagccatatctatataaatagaaaatatattctaaaagatactatatgcctcagcataaaatttgttgacatatatatttacatttgctagtataagtaatgtaaacatatggttatcaacaaaaacctacttatcagatatgaaaaataagaaaaaatctgtttacaaaaaggttgtaactataatataatatcttaaagaaaaaaataagttaattaaatactgtgataagaaatagtagcataaataaaacttaacagagagatctccctggctgaaagagattaagattaagtttatgcgaatgcatcttggagtactgcctcgaaatgtgaaattaatatatactaaaatttttatagtagacggcagcgggtacgcccgattaaagcgttatggtatgttagtacctaagttatgagttgtcatattagtttttatgtgataattagagtggaaccgcggagtaaacttctgcctctatattttagggggggaagtttttttatttaaaaattaagtactcttagtatgcaatttctataaagtatattaaaacttgttttttataaattttaaggggagtgtatattatgggttctatgcagtattttgataacattgccgctagttggaatgtaataagaagtgaatattttgaggaaaggttaaagtataaggtcttatctaaggttagtattaaggataagataacggctgattttgggtgtggtacaggttttataagtcttgctcttgcaagtgacgcaaatatggtatttggattagacaattccaataatatgcttagagaactaaaaaagtcagcgcatgacaaaaagcttaataatatatatttactaaaatcttcacttacaagtgtaactctgtttgatgagtccattgatgcagtatttataaatatggcgcttcaccatatcaaggatgctgaaaaagcaataaaggaaatgtacagagttctaaaaaaagatggtacagtagttatatcagatgtttcagagcataatggcaagtgggcaagagaagaaatgtttgacgagtggcttggtttttctaatgaacaaattgatatgtggttaaaaaatgttggctttaaaaatatagatattgaaaatacagatttaaaatgcaaaggaacctcaagtaggggagagcacactgaaacttcaatatttatagcaaaagctgcaaaataaattttaggaggagaaaaatgaaaatagaatcattggtaattcatggaggaaaagatggagacgaatatacaggtgcagtaaatgtccctatatatcaaacttcaacctttaaacaagaaaagttaggtgtaaacaaaggatatgaatattcaagaacaggaaatccaacaagagaagctgttgaaaagcttatttcagatttagaggaaggtcaatctggttttgcatttgcttctggaatggcagctattacagcagttttatctttatttaaaacaggagataaaataattatatcaaacaatgtttatggtggaacttttagagttttagataaggtatttaatcattttaatataggttataaaatagttgatacttcaaaggttcaagagataagggataatatagataaggatgtaaaggctatatacattgaaagtcctactaatccacttatggatattacggatattaagcttgtttcaagtatagcaaaagaaaacaatcttcttactatagttgataatacctttatgacaccatatcttcaaaaaccactaacacttggtgcagatatagtacttcatagcgctacaaagtatttaggtggacacagtgatttggtggcgggtcttgtagtggttaacaataaagatttagctgaaaagcttcattttatacagaattcaactggaggagtacttggaccttttgattcatttcttcttataaggggtataaaaactcttgcagtaagaatggataggcatactgataatgcaaagaagatagcttctctgttaaatcatagaaaagaaatagaaaaagtatactatcctggacttgaggagcatatagggcatgaggtccaaaaaaagcaggcttctggttatggcgcaataatatcatttgttataaatgaaaaatacgactataaaaagtttattgagaatttaaaacttattacctttggagaaagtttaggtggagttgaatcacttatatgccatccagctagtatgacacatgcagcaattccatatgaaataagacagaaagttggtattgtagataacttaataagactttctgtaggaattgaaaatggtgatgatttaatagaagacttgttgaaagctcttgaggggagtgaaaaatagtgaactatatagacgacattagacaaattataggaaacactcctataataaaaatcaataactttggattaaatagtggagtgaatatttttgctaagcttgaattattgaatccaggaggcagtgtaaaagatagagtaggcgtttatatgatagaggatgcagaaaagaagggaaaactaaaaaaaggttataccatagttgaaggcacagcgggtaatacaggtataggaatagcacttgcagctataaacaaagggtataatgtaatctttgttgtacctgagaagttttctatagaaaagcagacgcttatgaaagcatttggtgcaaaaattataaatacgcctagagaggaaggaatgcagggagcagttaagaaggcaaatgagcttttgagtaccatacctaattctataagtcttggtcaattcgtaaaccaagcaaatccattggcacactatgaaactacaggacctgagatttatagagatcttgaaggcaacattgattatgtagttgcaggtgctggtagtggaggaacctatgctggtgtattaaagtttttaaaagagaaaaaaccaaatataaagggtgtacttgctgatcctgaaggttctaccatgggtggaggagaggaagctagctatgatatcgaaggtataggaaatgattttattccagataccatggatatgaatcttgtagatgaagttattaaggttaatgatgctgaggcttttcatatggtaaggcaacttgcccttaaagaaggactgatagttggaagttcatctggtgcagctatggcagcagcaattaaattaagtaaaaagattaaaagtggtaatatagttactatctttccagatagaggtgacaggtattttagtaaaaatattttaggatagattgggtaaaatctataagcttatggaattgaagggagaaatattggaggtatttctctcttcttttaataaaatatgtcctataccaccacttttaatagaataaaaccaaataataataagttggttctattattaacaaaataaaatcctcttcttttaaaagaagaggatctattaacaaaataaaaatgtttaaatagtcgctcctcatctttcagaaaatatcctgctggaattagcaccataagtataaaaccttggttgctgaaacatcattgggccagtccctccgtttctcttgataaggaaatattaagttttcgaaacaaaacacttattaatttaattatacataataaaaatcctttgtcaacaactttatgaatatttttcataataatgatatttttgtaaaaaatctattgacaataaaaaggaatagttataaaattgcattaatcatattaattaaattggtttagtaagataacgaaaaatttatttggcaaggttgtaattaaaaacatagtatatagatataaatagtatgataaattagtttgttggtttacggggggacttttatgaatgatttagattataaaattaataagtctaaaactattaaaggggaaaggtatgaggaaaaaatctcaaaacttttaaaggaaataaaatatggttctataacattaattattcaagatggtgttgttatacaaatagaggcaagtcaaaagataagactaagatagaaagtttaaataaggggagaaaagtaaaatttaaattgacaactaatttttaaggtgttaacacaaagctatggtagttacataagaataatatgttttgactgactagaaatactagaggtcaagctttattaaataaagcttgacctctttgttttttatatggaaatgcgaagaagaagagttttttcgatttttaaaaaatttgataatttgaatagttacaattgaaaattagtttcaaaataaaatactattttagcatatacgattttgtattgaaaaaggtataggtggttatgggaatgtcaatagaattagatgatagaagtaaaagaatatttgatttacttcagaagaaaggtgctatgacaaaaaaagaaatactaaaaaatatagatatgaagttgactacattaaatcgtttgatgaggcctcttgaggatgaaagactaattgtcgaatatggaatagaggactcagcagggggaagaaagcctataatgtataacgtaaatttatgtggcttttatattataggaatagatatatcaagggaatttataaatatagtatttacaaacatcaaattagagttgttttatgaggacagaattaatttaaaaggtatactaagtgagaaaaaaattgcagataaaataattaactgcataaataaagttgtaggcgaacttagattagacgttttaactttatttggtgttggagtttcagttttaaatgttgcaagctttaaatgtagtgggtatacaaaattaaaaagtgaacttgagagggaactttcaagtagggtgattattgaaaatggtgcaaattctgcagcgttagcagaatatttatatggatttaataggagaatttcaaatatggcgtattttaactgcacagagatcatcagaagtggagtggtgctatcaggacaagttctaagaacgataaataataaagaagatgctttctcgaatatgttaattataaataacaaaaataagtttgatttcctgggaaattatgtgtcagaaagtagtataattaataatttttgctcaaaagtaaaaagtggaaggaagaccataattaagaaaaatttaagagagattaagcttttggatttagaaaatgccattaataagggagatagcttatccaaggaggtaattttaaattcagctgtgatttttggaatagctttagctaattacatacaagttttaggtttaaaggcaatagtattaggtggaagcttaattgctaattcaaaaactttctacgatgttttaactaaaatagtatttgatagaattaaaaatcataaaattaagcttatacgcgaaggacattttaaaggaaatattttttctacaggggcagcagcggtagttgtggaggaatatttaaaagtatctgtttgaatttgtttaagctataatataagtggaaacctactttggtttccacttatattattatttaagagaattaagagtatctcttctattttcctgtttcttttccatattttcaagagcagatttattcatattatcagcattatggtctatatatccttctgcatatctgtatcttttttcagtattctctatctcatcatttttgctgttggtatcgtttaatattttttgttttaagtcatttatttcttcacatcttctttcttgctttcctttagccatgcttagagcttgaggtgaagatatatcactgtgttgttctaggtgtctttcagttcttgtatttttttcaactaagtttgtaagctcatctaatctattttcagtttctcgtgaatttttattactcatagtgcacctccattaaaattttctttataaaaggatttctttatcttaagctaaaaaatcctataataattttttgtataagtagaacaatatatactagcgaattgtaggaaaagtgagaaaagaattgacatagggacaataaattgatagtatatatttaatgaattaatacgttagcgtgttaaagcggtaaagaacaaagttcaaaatgggaagtgaagttatgataaatttaaaaaaatatataccagaaggctctagggatatattatttgaggaatgcacaataaaaaataacattgaaaatatattaagaaatagctatataaatgttggttatgaagaagttagatcaccaactttggaattttacgatgtatataatcttgaaaatcaacccataagtcaggaaaagatgtataaactatttgataatacaggaagaattctagttcttagacctgacatgacaacacccattgcaagaatatgtgctacaaaacttaaaaatagggtatatcctttaaaattaagttatacaggtaatatatataggatgaacaaggctcttaatgggaaaataagtgaaatcactcaatcgggaatagagatacttggtttttcaagccttaaggcagacgcagaagttataattacagctataaaagctattttaaagacagggcttaaaaattttaaaattgaaataggacaggttgaattttttaagagtataatttcagacacagcattaaaagaacaggatacagaaaagttaagaaattttattgaaaataagaatttcagtaaggttgaggagtttattttaaggaatagcgatctaattggtgaaacaagttctaaagtacttatgaatctacctaatttatttggaggaaaggaagttatagaaaaagctgagcaattaacgtctaataagcaagctattgaggcattaaaaaaggttagagacttatatgatattgttaaaagagctggttttggagaatatattttaatagatttaggaatggttcagcatataaattactacacgggtctcatttttagaggatatgcccatggaattggagatgaccttttaagtggtggaagatatgataagctattaggacaatttgggtatgatattcctgcaactgggcttgctataaatgttgataatttagttgcagcgcttgatgattgtgtaagagaaaatttatattcaagagataggtatgttgtttttgcttctagctgtaatatagaaaaggcatatgaggcagtttctaaattgaattcggaagggaaaagggcagaggtaagcctttttgacaatatagaggaaacaaaaaaatattgtattgaaaataaaattagtaaaatctttaatgcagatacaggcaaaacaattgtggaggaaaactattatggacaaaaataaaacaattaggattgcacttacaaagggaaggcttgagaaggccgctgtggagatttttgaaaatataggacttgattgtagtgaacttaaggataaaggcagaaaacttatattccatgattttaagaatagtatagattttgttcttgtaaaggcacctgatgtgttaacttatgttgagcatggagcagctgacataggaatagttggaaaagacactcttcttgaaatgaaaaaggatttttatgaggttttggatttaaaggttggaaagtgtaaattttctttggcgtctatttcaagttttaaattaaatgagggatttaacagaatgaagatagcaacaaagtatcccaatgtgacaagagaatatttcagagaaaagggaatagatgttgaaataataaagatagaaggttctgttgaacttgcaccaatacttaatctagcggatgcaattgtagatatagttgagacaggaacaacacttaaagaaaatggtcttgtaatttttgatgatatatgcgatataagtgcaagaatgatagtaaatagggcaagtatgaagcttaataaggataggataacggatataatacaaaaagtaaaaaattatgttgagagggagagttagagttggaagatattataagaataatacaagatggcagtttggatggggaaaagtactttcagtcattaaaggagagacagggaaaagaaaatgctgagataattaaaacagtgaaattcataatagataatgtaaaggaaaatggagataaagcacttattgaatacactagcaaatttgataaagtagagcttcaaagtatagaggttacaaaagaagaaataaaagctgcttacagtaaagtagagaatgactttatttgtgcccttaaaactgcaaaggaaaacattgaggagtatcactcaaaacaagttcaaaattcatatgttataactaaggaaaatggtattgtaatgggaagaacagtaaggggacttgataaagttggtatatatgtaccaggaggaacagcggcatatccttcatcagttattatgaacgcagtacctgctaaggttgcaggagtaaataaaattataatgactactccacctatgaaagacggctttgtaaatccgagcattctagttgcagcagatttagctggagttgataagatatataaggtaggaggagctcaagcaattgcagcgcttgcatttggaactgagacaatagataaagtagataagattgtaggacctggaaatatatttgttgcaatggcaaagaaaagtgtatatggatttgtagatatagatatgatagcaggtccaagtgagatacttgttatttcagatgaaacaggaaatcctaaatttatagctgcagatttaatgtcacaagcagaacacgacacacttgcctcatctattttagttacaacttcaaaagaacttataggtaaggttatagaagagataaaacttcaagtagagggattaagtagaaaggaaataatacttgaagctttaaggaattttggtgccataatattggtagatagtataagtagagccatagaaataggaaatgttgtagctccagaacatcttgaaatcataacgcctaatccctttgaatatttgaatgatataaaaaatgcaggctcaatatttttaggaagctattctccagaacccttaggggattatatggcaggacctaatcatgtgcttcctacaagtggaacagctagattctcttctccactttcggtagatgattttgttaagaagtcaagttatttatattattcagaaaaggctcttagaaatgtgaatgataaggtagttaagattgctgaaacagaaggacttacagcacacgctaattcaattaaagtaagatttaaataagaggtgaaagtagtggaagaaaaaagaacagcctttatagagagaaaaaccaccgagaccagcatagaggttgatataaatttagatggtgaaggaaaatatgatatagatacagggataggtttttttgaccatatgctagagcttatgagtaaacatggacttatagatttaaaagtaaaggttataggggatttaaaagttgatagtcaccatactgttgaggacacagggatagtaataggtgagtgtatcaataaagcactaggaaataagaaatccataaataggtatggaacttcatttgtccctatggatgaaagcttgtgtcaggtatctatggatataagtggaagagcgtttttagtttttgatggagaatttacctgcgaaaagcttggagattttcaaactgaaatggtagaagaattttttagagcactagcatttaatgctggaataacccttcatgctagagtaatttacgggaagaataatcatcatatgatagagggattatttaaagcctttggaagagctttaagtgaggctgttagcaaaaatacaagaataaaaggagttatgtcaacaaaaggaagtatataaagggggcgttaagtatgaataaaaaaatagctataatagattatgatatgggaaatctccttagtgttaagaaagctttcgattatattggggcaaattcgtttataacctctgattcaaaggaaatagaaaaaagtgatgctataatacttccaggcgtgggagcttttcctgatgctatgagtagtttaaaagaaaatgggatagataaaacaattataaatgaagctaaaaatggaaaaccttttgcgggaatatgccttggaatgcagcttctatttgatgagagtgaagaggttacaaacacaaaagggcttggacttataggcggaaaaataagaaaaatgaaaacagagtttaaaattccacatatgggatggaatagtttaaatatacctagagagtgcaatatattaaagggagtttcaaaaggaagctatgtgtactttgttcattcttactatgcagaattggcggataaaaataatctaaatgcatattgtgattatgggactaagttgccagcggttgtaagctataaaaatatatttggaattcagtttcatccagaaaaaagcggagagataggacttacaatacttaaaaacttttgggagttgatataatatgataattttaccggcaatagatataaagcagggaaaatgtgtaagactttatcaaggaagatttgaaaaatcaagtgtcgttgcggaaagtccagcattaacggcaaagtcttttgaaaatgatggagcaaaatatatacatgtggttgatttagatggtgctttagaaggggaaattataaacttagatgctgttaaaagtatagttcaggttaccagtgttcccatagaattaggtggaggaataagaaatataaaggttgttgaaaaacttataaatataggtgttaaaagaataatattaggaacggctgctcttaaggataaagaatttacaagagaagctataaaggaatatggtaagagtatagcagttggaatagatgcaaaagatggatatgttgcagtaaatggatggcttaatgtgagcaaaataaactacatagagtttgcaaaaataatggaggatatgggcacagaagatataattctaacagatataagtaaggatggaacgttaaagggacctaattttgatatgcttaaaaaactacaggaaaatgtaaactgtaatataacagcttcaggtggaataaaggatttagatgatcttattaaattgaaagaaatgaatatatacggagctattgttggaaaagcaatatatagcgaaaaaattaatcttaaggaagccatagctgtaatagaaaagaggtgaaaggtatgcttacaaagagaataataccatgtcttgatgttgatatgggaagagttgttaagggtgtcaattttgttaacttaaaggatgttggtgacccggttgagatagcggatttttacaatagagaaggcgcagatgaaatagtatttttggacataagtgccacaaatgaaggcagaaataccatgatagatgtggtaagaagaacggcagagaaggtatttataccacttacagtaggtggtggaataagagatgtagatgattttaaaaatatattgagggcaggagcagataagatatctataaattcagcagcaataagaaatccagagcttataaatgaagctgcaaaaaaatttggaagtcaatgtgtcgtagttgcagtggatgcaagaagaaatatagaaacaggaggctttaatgtttttataaatggaggaagagtagatacaagtttagatgccatagaatgggttaaaaaatgtgaaagtcttggtgcaggagaaatacttcttacaagtatggatgcagatggtactaaaaatggatatgatgttgagctcacaggtgcagtatgtgatgcagttaggataccggttatagcttcaggaggatgtggaaggcttgaagattttgatgaaatatttaaaaagacttcagctgatgcagcacttgtggcatcactttttcattataaagagtatacagttggagaagttaaaaactatttaagagaaaatagtattcaagttagattataaagcttggtggtgatttgtttggaatataaaaaaatattagaaatgatggatttttcaaaggggcttatccctgcaatagttcaggatgatgaaaacggcgaggttttaatgttggcttatatgaatgaggaagctctaaaaaggacggtagatacgaaaagaacctggttttggagtagatcaagaaaaagttattggaataagggggagacctcaggacattttcaatacgtaaaaagtataggcattgattgtgatggagatactattttgataaaagtaaaacaggtgggagctgcatgccatactggaaatagaagttgtttttataggagctttgagtttgaagatggaggggcaaagtaatggataaaaatgaaatactaagtaaattgtataatgttattgaggatagaaagaataatccaattgaagggtcatatacaaattatctatttgaaaagggaatagataagatactgaaaaaagtcggagaggaaacaactgaagttataatagcctcaaaggatgataacaaagaggatttaataaatgaaatatgtgatgttatatatcacacattagtgcttttaaattataaaaatataaaacttgaagatatagaaaaagagcttcagaagagaaatgagaaaattcttaacaaaaaacaagagagaagacctattgaaaatatatagtttattgtgtattattagtgtaggttaaaggatactaataaaatatttaaacaacgggaagcgaggataataaaaatatgaacattgatgaattatcaataaataccataaggattttatcagctgaagcaattcaaaaggccaattcagggcatccaggtaccccactaggagcagcacctgtagcgtatacactttggtcaaagtatttaaaacacaatccttcaaatcctaaatgggtcaatagagatagatttattttatctgctggtcatgcatctatgcttttgtattcacttcttcacttatttggctataagatttccatagatgatttaaagaattttagacaatgggagagtataacaccaggacatcctgaatatggagttaccccaggtgttgagataagcacaggacctttaggtcaaggtatagctaatggtgtaggtatggctattgcagaagcacatcttgcatcaaaattcaataaacagggttttgatatagttgatcactatacatatgttttaagcggagacggctgtatgatggaaggaatagctagcgaagctgcttcttttgctggaactttaggattatcaaaactaatagtaatatatgatgataatgatatttcaatagaaggaaatactgatatagcatttaaggaaaatgttggagaaagatttaaagcatatgattggaatgtaataaacgttgaagatggaactgacgtaagtagtttaagtaaagcaattgaaaaggcaaaacagcaaaacgataaaccatcaatcattatagctaaaacagtaataggctttggctcaccaaatcaaggaacagctggagttcatggctctccactaggagaaactggagtaagtggattaaagaaaaatttaaattggaattatgaagaagaattttatgttccagaagaagttaaagagcatataaaaaagcttcaaaaaacatttgaagaaaatgaaagtaactggaatgaacttttaaataaatataaagaaaaatatcctgatttatttgatgaatttaatgcttggatgaatggtgaagtaaaagtaaagctagatgaaattgatgcatttaaagagttagaaaaacctatggcaacaagagattcatcaggaaaagcattaaatataatagcaaatgtagtgccaaatttaataggtggatctgctgacttagcaccatcaaataaaacatacatgaatgataagggtgatttttcttctgatgatagaagtggatcaaatcttcactttggagtaagagagcatgctatggctgctattgcaaatggagtatctgcacatggcggactaaaaatattcgtatcaactttctttgtattcagtgattatatgaagggtgcaatgagaatgtctgctcttatgaatctccctgttgtgtatgtgcttactcatgatagtataggagtaggagaagacggaccaactcatgaaccaatagaacagttagcagcacttagaagtatacctaatttaacagtattgagaccttgtgattcaaaggaaactgtagaggcatggaaatacgcattagaaagagaagatggacctacagcacttgtacttacaaggcaaaagcttcctttgtataatgaaactggaaaaggtttattaaaaggtgcgtatacactaaaagattctaaaaaggatgttccagatatgcttcttatggcttcaggctcagaagttgaattggtgtatgaggcacaagaagaacttttaaataaaggaatagattcaagagttatcagtgttccatcctttgaacttttcgataagcaggataaggcttataaagaaagtgttatgccaagcagcgttagagctcgtgttgcagtagaggcagcatcttcatttggttggcataaatatactggaattgatggggaaatcatttcaatagatcattttggagcttcagcaccagctgaaacacttttcgaagtgtttggattcactaaggaaaatgttattaagacaagtgaagaagtgctaaaaaataataaataagaataaaaaagcaagttaggttaagatattatgcctagcttgtttttttatagaaatattttataataatattacataaatgtttattagtttaaaacttggaaacaataataataaattaatattattaaatgaggagaaaatatatgaataaaatacttttgataggaagaatgactaagaatccaagtattaagcaaatagaaactactggaaacaatagatgtaattttactattgcagttaatagaagagtaagaaatacaaatggagaaaatgaagctgattttattccagttacagtttggggtaaaactgctgaaaatgttgcaagatacatgaaaaaaggttatcttgttggtgtatctggaagacttcaagttagaacttatcaagatgttgatggcaatagaaagtatatcactgaagttgttggtgaagaggttcaatttttagaaactaaaaaagaagcggtttaagaagacaccccaaaataatatgattttggggtgatttttaataattaatattaaaaagttaaaaaatttgcatttaaagttaaggttatgtaaaaaaatagaaaattcattgaaagtgtatgggatatattgatacaattacattaaaaatacataaaggggaggaaataaaatgcgtaataatataaaaaaactaagtttgattttttgttttatttttacaattatgtttttatcagcatggtctaaggttggcaatgttaatgttatggcggcaaattttaataatctaaaagttcattatatagacgttggacaaggcgatagtgaactaatacaatgtggtggaaagaatatgcttatagatacaggaaccaatgaatcaactagtaatttaatgtcatacttaaagaatcaaaatgtgcagaaaattgactatttagttcttactcatccgcatgaagatcatataggtggagcagatgaagtaatcaataatttcaatattggaactatatatatgccaaatgtagctactaatactcagacatataaagatgtaatacaagcaatgagaaataaggggcttacagcaacaaatcctgtggtaggaagtacatttaaagttggtagtgcaaattgtatagtgtatggtccaataaatacgaatagtgaaaatttaaatacgtactcaatagtcataaaattaacctatggaaataataaatttatgtttacgggagatgcacaaagttccaatgagccggatatgattaatgcaggatttgatttaagcgcagatgttcttaaagttggacatcatggaagtcatacctcaagttcacaagattttttaaatgcagttaatcctaaatatgctgttataagctgcggattaggtaatgattatgggcatccacataaggttacaatggataagttagaagcaatgaatatacctgtgtacagaactgatgaaaatggaactatagtttgtacaagcgatggtaacaatataagctttaattgtgaaccgggtgattataaagatggttcggaattggcaggaggagaaagttattcatatatgaaaattgatatgaggaaactattgtcttttagtataaataaataataaaaaagcaaaatcatttattaattatatagatgattttgttttttttatttacatatttaacccgtagaatatataataaagtttgtaatggttaaaattaaataatatgataaccaaataatcgcaaatgtaattaatggaggtgctaaaatggaggaagatagtttttacacaaagggtgaagaaattgcaaatgctataacgcatttagttggtgcagctttagcaattgcagcaattgttattctagtagtttttgcagcgaggaatgggaatgcatggtatgttgtaagttattctgtttatggtgcgtgccttttcatactatacttattttctactctatatcacagcatctttaacaaaagagcaaagaaagtttttaggatatttgatcatgcttcaatatatatactaattgcaggaacatatactccattttcattaacggttcttagacatcatggaggttggataatattttctgttgtctggatagcagcaattattggaatcacactaaaggtttttttctgtggtaaatttgaaaaattatctacattactctatgtaataatggggtggatgattgtaatatactttaaaaccttattagcatctatgccttttacaggaatagtatttttagttgctggaggaatagtatataccctaggagctctattatttctattcgataaaattccatacaatcatgccatatggcatctatttgtaatgggtggcagcgtatgtcacttcttcgcagtcttgtatttgttataataaaccttatgaaacttaatatatagcccgtaccaaaatcacaatcaacaagtgattatggtgcgggctatatattttagtttcaataggtttattaactttttcaaagtaagaataagaccaaaagaaaaaatcacaatcaacaagtgattatggtgcgggctatatattttagtttcaataggtttattaactttttcaaagtaagaataagaccaaaagaaaaaatcacaatcaacaagtgattatggtgcgggctatatattttagtttcaataggtttattaactttttcaaagtaagaataagaccaaaagaaaaaatcacaatcaacaagtgattatggtgcgggctatatattttagtttcaataggtttattaactttttcaaagtaagaataagaccaaaagaaaaaatcacaatcaacaagtgattatggtgcgggctgtatattttagtttcaataggtttattaacgactatagatataataaagaagaggttttaagactataccattatcactattgatatatcaatagtgataatggtataattaaataaagttttgaataacctctaaaacttgggaaataaaatatagtattatataaaaaatattaattgactttatgtaaatgattatttaaagttgtgtgctaaattaagaaggagaataatatatatggaaaagatagcgattataacggatactacggctgatttgactgaggagtttataaaagagaatgatataaatgtattatcattcagaatcatatataaagataaagaatataaagacaaagtagatataacttctgaagaggtatataggaattttgagattgaagtacctaaatcttccatgccatcacttcaggatatggaggatttatacaaaaagctagaggaagaaggatatactcatgcgataggtataaccctttcaagtggtctctcaggaatatttaatggactaaaaatgattgctgatgaacatagtaaaattaaatcttttatatatgattcaaagctaatatctttaggtgaaggtgcattagttgaagaatgttctaagatgattcataacaataaaagctttgatgaaattgtaaaggctataccagagataaggaaaaaaatacatctgttttttgttgtaggcactcttgactatttaaaaaaaggtggtagaataggaaaaatagcaggaacaataggaaagcttttaaatattaaacctatagtttcagtggatgataatggtgtctattatgcgtacgataaggttcgtggtagaaagcaatctctaaatagagtaatggaaatagcaaaagatattactaaaaatagtaaatgtcgagcatatgtaatgcatggtgatgctgaaaaagaatcaaaagaattttttaagaaagtaaaagagcttccaaatattaacaatgctttttataatggatgtataagtccggtttcaggagttcatagtgggccaggtcttgttggacttgtactattagaggaataatatgcatagaaatgaattagatattaaagaagaggaaaagaaactctacgaggaatataagcagaaacttgcagaaataaggaaaataaaaaaagaaggtgaagcagttggccaagtatttacaaaaggactgctccccctttatgttctctttatattgagtttagcgcctacaaatggaaatgatattgcaaaccaaattggaaagagaactgatggcttatggattccaagcactggtggtatataccctatattaaaaaaaatggaaaagaaaagttttatatctggaaaatggaatgatgaaagtaaaaagaaacagaaaatatacaacataacagatataggattgaaggaacttgagaataagaaatatcttttaaaagatagaataagtgatgcacttcatgtttttgaaattgtatataaagatttatatgaaaaatagtattaaaagagctttaatttagtgaataaactttaattaaagattatattatgtgaaaagcataaatatttaagggaagtaatcgctatgagtaagttggcaggaggaatttatgaatatatactctttatttgtggttgcaattgcattatcgctggatgcttttggagttgctcttagtattggacttgatagttgtgtaaaaagaaagaataagctattattcgctatttcatttggcttttttcaatttttgtgtacctttataggggcatattcgggatttctttttaatacatacataacatatgtacctcagattattggtggaatgataattgcatttgtaggtgcatttatgataaaggaagggtttgataataaggaagaaaagctgttattaaactttaaaatgtattttgttttaggaatttcagtaagtatagatgcggctgtagttggattcactatgtttaataaaatttcaagtaattatgttatattaggagattccgtttttataggaatagtaaccttaattctttcaataattgcatttattatatcaaggtatttgaagagaatacaattagtgtgtaaatatgctgactatataggaggaattatattagttatatttggattaaagatgatgtttttttaatataagattaagatatgcctctcattttatagggggcatatttttttgcttgaaattgtaaaaaggcattatttaagttttacattgttttccgtatggtaaagaattgtgatataattagtatgaagaatacaatatatttttgtatatttttaataagataccaaggtgagattatggatttgaaaacgtacctgaagagtcataacattaaaattactaaatgcaggcttaaaatattaaaaatattgaataatgctaatgatgcccttacggtagagacaatatacaaaatttgcaatgataatggaaagtttgcagacttatctactgtttataggagtttagatttatttgaagaaaaaaatgttgtgagtaaagtcgatttaggaaatggtaagtatagttacaaaataaaaggagatacacataagcatgtactaaaatgcaatatgtgtaataaagaaatagaaatagaatgtccaatggaccaagtagaggaaattataaagaataaaactgggtttgttttaatagatcatgaactaaaaatgaaagcgctgtgcaaagattgtatggataaatcaaacaatgaaaagaattcttaagttagtttaaaggattagcttgttctatatgttttaatttccatattcctgatgaatttcttagcatggtaagtttataggttatagttttgtggggagatttcgattcaattccacttacgaataatatagattcatcattagaagaaaattttaggttataagaatcaaccttgtaaagtttatgggtattaaaaactccagaagtcatataataatcagcagcataggttatatcatgtagcttgttcaaattaattctatgatctatataaaatataattaaaatgactaagaaagccgcaatgagtggtttcttatttttgaaaataaaatttttaagcatagatgcacctctaataattgtaaaatatttacaaaaataattatattgctaaaatatataaaaaacaatacttatatataaaaatatttaaggaaggattaattgatatggattttacatcattagttttatttgagaagaaagaaaatgacaataattttttgaaagagattggaagttacgaggtaaatgatggagcagaatacataatgaaaatgtattacgatggtgataagataaaggcatggtttaatacaaaaaatgatgttgaagattgggaatattcagcttgttatgatctttttaacgaggaactgtttacagaaaaaggttttgatataagtgaagtggatgatgaatacaatcctacatggcttgttaaatttgattttatagaggaacatactgagatgcaaaatagaatatatgaattatgtagtttgataaaacaagaaatggatagaatatttaagagtatgcaaggaaaaaaggatgagtatatttaagcttttggaggatgtatggaaaagtctgaaaaatatataattgagagcttatcaacaagagggcactgtcttcttgaggaatttaaatatcaggataaaaatacacaattttggggtgtttcttttgttaataatgagattaagaagtatgtgattttttcagctgaagataaatttgaatatatagattattcaaattcagagcatgaaaatattcaagatattagtagtgaaaatattattaaggtgctattagtagaaaatgatagctcatttcaaaaatatgtacaaaatcatggaaaaggtaatattatagttatagactgtttaaaaaacaaaatactttatgcagaggagacaggaaccaatattgctgagataatcacactattcttaaatgaacttcaaagcagagagcaagaacaaaaaaaagatatgagagtaacttggatattaattgttataaattttatagtttatgggatttcagcctggctttctggtaatccagttgctataagtaatcaagttcttaactttatgggagcaaaaaatagtgtgctaatagacaatggacaatattatagacttataacatgtatgttcttacatgccggcataactcatattggtgctaatatgtattcattatattctatggggtatatgcttgaaaatatttatggcaaacttagatatactgctatatatttcatatcaggaattacagcttcattttttagttacatctttagcagagaaagcctgtcagttggtgcatcgggtgccatttttggtcttctaggtgcagctatagtatttggatttaaattaagaaaaagaattggaaaagcattttttgcaaatatggtaggagtttttgcattaaacatatttataagttttactatacctaatatagatatttttgcccactttggaggctttttaggcggagttgtagtatcggttattttaggaagaacaatatgggagaaataataagaatggttttttaattataaaaaccattcttattattttgctatgatattttattgaatatttaatccttgtatgtcctcataattaagagtttctacatctaaaagcttattagacatattctcaagtatatgtttgttattaagtaaaatattttttgtgtcttcatataatgtttctactaaatctttacattcatcaattactgaagttgaaacagaatagttgatttctgataatgcatctgcgtttaaaagtcctaaacttgatcccataccatattgtgttacaagctttgttacggcgctagttaccttttgcaggtcgttataagcaccagtagttatagaagactttccaaagattatttcctcagcagctctaccaccaagcaaaactctaattctattttgtatatattctttgttttgatacattttatcttctggtatacttaaggtgtaaccgccagaaccattggtgcttggtattatagttatctttgatactttttcttcaggaagtacctttaatgatactagagcatgtccggattcatggtaagcagttatttttttatcggtcaggcttatatgtgatctatcaaccttttcataacctgcaattacaattgaaaaggctttatccatatgttgattttcaataaaagaactattttctttacaggcaagtattgcagcttcattaactaaattttctagtttggcgccagaaaaatatgctgttttttgtgctaaatcgtttaaatcaatatctttaacaggtttgttttttactaaaaggcttaagattttttttcttgcagaaatatctggaagatttatctcaatatgcctatcaaatctacctggacgaagaagagcactatcaagtacatcaattctattggttgcggcaataacaactataccttctttttccttaaaaccagacatttcagttaaaagtgcatttaaggtttgatctctttcttcagagccaccggattttccaccatcacgttttttaccaatagcgtctatttcgtctataaaaataacagcttttccatttgaacgtgcttttttgaagagctgtcgtattctactagctcccacgcctacataaacttgtataaagtctgaacctgacattgcataaaatggaacattagcttcgccggcaatagccttcgccagcattgtttttcctgtaccaggttcaccatataaaataactccttttggcattcttgcaccatataagttgtatttttctggatttttaaggaaatcaattatatcctgaacgctttcttttgcctcttcgttacctgcaacatcgttaaatttaacacctacattttctatgctgtctgtttctagtttatcaactgcaaaggctttttttgttggaatcgatatcttaaagaccttaatcaatgaagtaatgaaatacagtgtagagattgcaagaattaataggtaaactgtactttttgactgtttaaaatcatcttcggatacctttatactattctttaacagattttccttaaaattatctgtccttggattatctgtagtatatactgacccgctttttaattgtacagttattttaggggaggatgttaggtatacagtttcaactttatttgctttgatatctttttcgaaatttatatacattttatattgtgtcttattaatactaactaaggaagaggcaaataaggttaaagagcacaaaaatataaacgcaggaacgataaaatgtttattttttagatatttcattctatatcctcctagatactaatctggtttacataatacattatacagaatatttgtcccatgtctattggtaaataaaacaagtaaatcaaatgtttaaaaatattaaaaatgcataacatattagcgaataaatcatgtaatataatttcataaataaaaactgttctaaaaggtgaaggttttttattaaagaaattgatttactatttttatctaaatttgtaggtgagaggagtgtacttatgaaatctttaaaaggtgtaacaacaggagcagttataggagcagttacggggatgattattgcaccacagcttagtaagagtgctagaaaaaaatttagaaaatcaagtagaatgataagggatactgcagaagatataatagattcaatgaaaatgtggagtaaataaaaaaatcggatagaaatatccgattttttatttaaaaagacttaaaaaaagtgcttgactcttggaattttaagaaaaaatatggtataatcatattacgtaataaaaatacatttatatagtaataccatataaatgccaataattgataaaaaaattaaattcaattaaatcacatgagcgagtaaaggaagatacgtatggaaatattgtctttgggagaaaaaattaaagcgagaagaaaagaattaaatatgacacttaaggatttggctggagacaggattacaccggggcaaataagtctggttgaatccggtaaatcaaacccaagtatggatttacttgaatatcttgccggtgcgcttaatacatcagttgaatatttaatggaatcagaagaaacacaagctgaaaaaatatgtgtatattatgaaaatacagcagaagcatatatgcttaatgatgaacttatggaagctgaacagtatcttgaaaaggcaatgtattatgcagaaaattataagatttcttatagaaaagcgagaacgctatatttatatggatgcataaatatgaataagaacgagttaggggtagcacagcaattttttctttcatcaaatgttctttttataaaattaaatcactatgaggatataatcaatacgtttataaaccttggtaaaataacacttaatttaaaggcatataattcatcttgtagttatttcgaacaagctgaaagagtttcaagagataacgacataggaaatgattttctaataggtgaaatttattattatatgtccctagtttattttaagatgaataatagcaataaaacaattaaatactgtttaatggctaaagaaaaatttgcagagcttgaaaacaaaaaggaatatgcaagaacactacttatactatctaaggaatatagtaaaagtggagatgttgataatgcaataaagtattctaagaaggcacttaaagcttttaaagaaaatgataatatgtttgcggtagcagatatagaaaatgagttaggaaaattattctatgaatttgaaaacatagaggaatcattcatacatttaaataaagcaaaagaaataagaaagaaaacaaaaggacatgaatttatagaaacattatgtaatatttgtgaaaattatataaaactcaaagatactgaaaattctcaaaaggttttaaatgaaataaaagaaaacatagatgggaataatgtatttgatatacttaaatactatatgcttaagtatagaataagtattctaaataggagcttaaaagaagctgaaaatattttactaagagcgcttcagtatgctgaaaatatggaacttgaaaaagaagctgctgagttttcggtaataattggaaagtactatattgataatggcgatgatgtagaagctgccaaatatctaaatagtggtatagaaaaattcaaaaagataggtgtattgaaggatttgtaatcggataggtgtgagaaggatggaaatattatctgttggtgaaaaaattaaaagagcaagaatttataagaggcttacactaaaagatatatgtgatgataaagtatccgtatctaagatgagctgcatcgaaaatggaaagataactccagataatgaaattttagaatttgtggctaaaaagcttaatgttgctcttgactacttaaagtatgatgttaaagatcaatttcagagtaatcttgataatttgaaagatattgaagaaggaaaaaaggacgagtatctaagatacaatgtatactatgcagagcaatatgaatattatgatattgcgtttcaatttatgcatgaattatttaatttgtatgttaataaaaataagcttgatatagttcaaagtttaacttcagagtattatgacatatgtcgaaaggtgacagattgtgataatagatctatgtataaccttgatataggaaaatatcttcttgctagtagagaataccgtcaagctataaattattatagtagagttagaaaagaattaaaaactggattctcagaaaacaaaaagagaatcaaaatgttgatagaaagttattactacgaaacattaagctatattttatgcgaggattacgataatgcatatgaattggagaaagaattgttagaacttattgaatatgttgatactgataatcaacatgcaaaaatatatagtgtaatgatgtttctgtgtttaaaaaagaatattgatcaatttgattactataaggaaaagattgagaattactgtgatattaatagtgaaattaaggcaagggttatgtatgtttgtgcactgaagatgattaatgatgaaaaagtggaagaagcaaaaggatacattgctaaagctttagaacaatttcaaggaaaaattgaaaataaatacattccttttatagtggaattggttaatgaggtttcaagacgcaataatttagaaagatacagaggaatatgtgatcttatattagattattctataggaatagaaaacagtgttcttatggagagatgttattatttaaaatcaagaatatttaaggcatcaaatgatcttgaatcttatgaaatgtatatgaatttggctttggatctccttataaagagtggaaatgaggatgatatctatacaagatatatggaaatgggaaatatgtactctacattgggcaatgtaaaagatgctcttagatattttaatttagcaattaacatgagcaataaaatgtaaattttattgctcatgtaattttatataaaattatgaattatgttaaaagggaagtgaaagtatggatgttgataaattaacattaaaagttcagcaagctataaatgattgtcaaactatagctgtaaggtataatcatcaacaaattgatacaatccacctttttatggcaattatatcccaagaagatggacttataccaaacatattaggcaaaatgggtgctgatgtggagactgttaaaagagatacagaagctgaacttgatagaatgcctaaagtacttggagaaggtgcacaaaatgcttctatttatgctacaagaagatttgaagaggtatttgtaaggggagaaaaaatatcaagagattttaaagatttatatataagtgtagagcatgttatgcttgcattaatggacatagatagtggagcaataaagagcattttagataaaaacaatatttctaaaaaagaatttttaaaagcactcagggaagtaaggggaaaccaaagagttgatacttcagatcctgagggtacttatgatgcgctaaataaatatggaagagatcttgttaaagatgcaaaaaaacacaaattagatccagttataggtagagacgaagaaataagaagagttataagaatactatcacgaagaaccaaaaataacccagtgctaattggtgaaccaggagttggtaaaactgctatagtagagggacttgcagagagaattgtaagaggagatgtcccagaggggttaaaaaacaaaataatattttctcttgatatgggatcattggttgctggtgcaaaatacagaggtgaatttgaggagagacttaaagctgtattgaaggaagttgagagaagtgaagggaagataattctctttatagatgaaattcatactatagttggggctggaaaaacagaaggcgcaatggatgctggaaatataataaaaccaatgcttgctaggggagaacttcactgtataggggctacaacctttgatgagtacagaaagtatatagaaaaagacaaggctcttgaaagaagattccaaaaggttcagatagatgaacctacagttgatgatgctatatcaatacttagaggactgaaagaaagatttgaaatacaccatggagttagaatacatgataatgcaatagttgcagctgcaaagttgtctgatagatatataacaggaaggtttttgccagataaagcaatagacttaattgatgaagctggggcaatggtaagaatggaaatagatagtatgccaactgaattggatatgctgaaaagaaaaatatttcaaatggagatagaaaaagaggctttaagtaaggaaagtgataaattttctcgtgaaaggcttgaatccatacaaaaagaacttagtgatttaaaagataaagataaagcaatgacagctaaatacgacaaagaaaaagctcaaatacaaggtataaaggaacttaaaacaaaattagatgaaataagaggtcagattgaaaaagcggaaagagaatatgacttgaataaggcagcagaacttaaatatggtgaggtgccaaagcttgaacatgaaattgaagaaaaagaaaatctgataaaacaaaatgggcaaaatgcaatgcttaaagaagaagtaacagaagaacaagtttctaatatagtttcaaaatggactggaatacctgtttcaaaattggttgaaggtgaaagaaataagttaatgagactttcagatgagcttgaaaaaagagtagtaggtcaaactgaagctgttaaatcagttgcggatgctgttattagagcaagagcagggcttaaagatatgagtaaacctataggctcatttatattcttgggtccaacaggagttggaaaaacagaactcgccaaaaccttagcaagagttatgtttgatagtgaagataatataataagaattgatatgtcagagtacatggaaaagtattccgtgtcaaggcttataggatcacctccaggatatgtaggatatgaagaaggaggacagcttacagaagctgttagaagaaaaccatatagtgtaatactatttgatgaaatagaaaaggcacatagtgatgtattcaatatattccttcaaatatttgatgatggaagacttacagataataagggcaatacaattgattttaaaaattccataattataatgacctccaatataggcagtgagcaccttcttaataataagggggtatcaaatgttgatgaggaaactaaagataaagtcatgaatgaattaaagggtagatttaagcctgaatttttaaatagacttgatgatataattatgtttaagccactatccattaatgaaataggaaaaataattgatatattccttgaaaatataaaatcaaagcttaaagaaaaaaatataaagattgatattgctgaggaagctaaaaaaatcatagcagaagaaggatatgatcctgtttatggtgcaagaccattgaagagatatatagagaatactattgaaactcatatagctaaaatgtttatatcaggagagatttcagagggtgacatcttgaaaatagagggctctgattcgaagcttacaatagtaaaaaaataaatttattttaagaaatgacaaatagaaggtaaggattatattaccttctattttttttttctaaaaagcaatactaaaaaggaaaacaatatatatggagatgttaataaatgaaaaaggcaaaagaaaaatatttgatttttatattaatctttttattacttcccattaatgcgaaagcagaaagtaaggggattttaggcaagaaagaagagaaaattgcttttttgacttttgatgatggcccaacacctaataatacagttaaaataattaatgaactaaataaaaataagataaaggcaaccttttttatagtaggtgaaaagggagaagagcatacaaaggctatggaggaacttgttaaaaataaaatgtgcataatgccacacagttatacgcataaattatctatatataaaagtttagataattataatgacgatttagataagtgtataggattcataaataaggttaagaaaaataaaaaagaattgaaatatgtaagaatgccaggtggatcatatagtagatataataaatatgttgttagcagtataagaaaaggcatactaaaaaggaatatgaattatgtagactggaatgtatgttcgggtgatgcagaggctcattatgtttcgagagaaaaaataattagtaatgtaaaaaaacaatgtaaggatcagaaaattattgttatattgatgcatgactcatattataaaaaaactacagttgagtctattagtgaaattgcaaagtatttaaaggaaaaagactataaattcaaaacttttgacaatataagtgaaaaggaaagaaaggaattaatacgtatgggtgttatgaataaaaaacaaaaaatagataaataaaattgggtgacttttatatagttgatactttataaaagtcacctcatttaaaaattatttagtatttgtttctctgttaatcacaaattcttttgccttaaattcaagagaatcatctattgggtctaatataatttcttttttgtattttaattctagggctgtttttataaatctatcagcaagctcgggatttttggagagtagtgaaccatggaaatatgtacaataagtatttttatagatgcaaccttcatatccatcgcttccgttatttccatatccaacaatggtttttccaaaaggttttaaatcatttatgtatgttcttccagaatgattttcaaaaccaacataagtttcgttaaaaagctcattttttataacagtatttcctataaatcttttatctccaggctctgtgtatatatttaatatatctaacccagaaagcttttctccttcaggtgtagtgtaatactttcctaaaagttggtagcctccgcaaatagcgataaatactttttcactgtttatatagtcccttattgattctttttttgtatttgtaaggtcctcagaaactattgattgttcatagtcctgtcccccaccaaagaaggcgatatcataagcatctttatcaaagttatcttttaatgatacatttgatatatttactttaatgcctcttttttcagccctatattttaatattcttatattgccaatatcaccatacacatttaataaatcgggatataaatgacatatatttagttccaatactttcaccaccaattaccaaagtttttttataaagcctttagaataaaggaatttcctaaggtctatcattgcagtatatgtagcaagtacataaattatttcaccatcacaattcttcatactattaagtaattcttcaaagttattttcaagttcaaagttatcattattaagaccggcaacttttaggcgtatagccatatcgtagagtctaatacccgaaaccataaccttatttatatttaaattgcttagtttttcaaaatctacatcccatatccaagatacatctcttccgtcagcataattgtcatttaataaaacggctaagcttaattctcttttatcaagagatatagttttgatagcttcatcgtatccggcaggattttttactaaaattattttaacattttttccggctatatctatggtttcttgtcttccaaaactactttttgaattctttagagaatcaaatatagtatcgtcctctatacctaaaaattttgctacagagtaagcgcatagtgcattatatatattatatacaccaggttgatttaaataaaagtctgtaccatttatagatattgaggaaccagaaggatcaagagcttttacactatcaatataataatctaaattaggtcttttgtatccacagttactgcagaagaactttcctaaatgattataagttataaattcatattcataaggatgtttgcatttgttacagaacttagcatctgcatttatacttattttgttttcttcgttaataggacagtcaaagccgtagtacataattttattaggtacatctaagtttccgagaagggattcgtcaccgtttaatattaatgttgcttcgggagccttattaactccttccattatttttaatagagtagtgtaaacttctccatatctatcaagttgatctctaaaaaggttagttataattatagcctttggttttgtatattctgttaaaaatttcaaattagcctcatcaatttctattactgcatatttttcttttgaatcactaaatttaaagttttttatgaaacacgaagttattcctggctttagatttgcgcctgtattgtttgttattacctctttgccacttgattttagtatgctgtagattaaattagtggtagtagtttttccgttggttcccgttataaatactatattgtaatttttggttaccgtagaaagaatattcttatctatctttaaggctactctgccgggaaaatttgttccacctttaaaaagtctactggatattcctattatcattttagaaataattatgctgaaaaaacttcttatattaattttgaacacctccaatgtctaatattataatacataattttaatatttacatcaatatacgcataattttaaggaagttaactataataatttgttaaaaatataaaatcctattttaataagataatttaaatagtataattagtctgtgtacttttgcaaattggttgctgaaaggagacgtataatgtatacaaatttaatatttatatttaaaattatcttagagggaataatcgagggagtaactgaatttttacctgtatcctcaacaggacatatgataatcttaggaagtataataggatttaaagaaggggcgaagccggtatctttatatggtgcagaatacatacatatgttcgaaataataatacagcttggtgctatacttgcaatagtggttttgtattgggataaaatattttctgcacttaagccatcaaacttatttccatctatgaaagaacacgaaaaatcaggtattggggtagtaggagaattttttgtaaaaggttataatacaatgcctggatttaaattttggactaatatagttgtggcatgtataccggctatagtaataggtttgccttttcaaaagaagatagataagctactgtttttccccgcaccagttgctgctgctcttatggtaggtgcggtatggatgatttttgccgaaaataaatatcgaaaaagagcaaaaataaaaagtgtagatgaaataactattaagcaggcaattgtaataggatgttttcaatgtctagctttatggcctggaatgtcaagatcagcatcaacaataataggagcttggatagttggtgtagcgacagttgcaggagccgagttttctttttttcttgcaattccaatgatgttaggagcatctctattgtttttaattaaaaatagcgtagtactctcaagtgttcaaatattaggactggctgtaggatttatagtagcttttatagtagcattagtcgtagttgacagatttataagtttcttaaaaaagaaaccaatgagaatatttgctgtatataggttagctattggtataattgttttagtgttaggatttactaaagtgataagttgattttaatatagtagtggttaaggagaagctttaattagcttctccattattatttaataacaaaattctatttagtattgtactgtatagatattaaataaaggataataataattttataattaaagaaaaggggagttttaataaatgaactattcagagattatagaagatattattaaagagaataaatggataaaaaatattataggaatggatagaatacgatgtgtaaagttagttaaggaaaagggaaaacttatggtaatagtggtatcagataagttaaaatttcctatatgcagttttgtaagaaaaattatggtttcagaaggagaggtgattttattttatgatggagaatactttgaaagagtagaaaaaggtgagtataaccgctataaagattatcttgacatggatgaatggaatattattatgagagataatcctacagatagattagttgaagaaaataaagtaagtgatagagaaaaattttatgtggaacttcatgagactgcaaaagattatataaatggtaagtatgataagaaatgcacagatgaattaaatcatatatataatctttagaattattgttttatgcatgaattcttattgcgttaaaaatgcattataattcatgcataaatttttattgacaatatgaataaatgtggtatgatattattcgttgattgaagtttgtaatttttaaaaataaaaaagtttttagaaatgtgttgacaaagtttcttcaaaatgataatatatataagctgtctagtgcagcaaacaattgaactttgaaaattaaacagagaattaaagaaccagcaattcttttgaatagaatttattctatttaaataaatttagcgatgagctaaaggaatacagattagcatctgtataaaggattcagaagaacctcatattgataatgatgaggggttttgtgtaagacgaagaaatgaagaaaactaatagtaatctatagtgagcttcattgatgaagtattacacgaaattgaccatcatagtctatagagatttggacgtatctaatcaaacttttaaattgagagtttgatcctggctcaggacgaacgctggcggcgtgcttaacacatgcaagtcgagcggggaacttcggttcccagcggcggacgggtgagtaacacgtgggtaacctacctcatagtggggaatagcctttcgaaaggaagattaataccgcataatactcgagaatcgcatgattcttgagccaaaggatttattcgctatgagatggacccgcggcgcattagcttgttggtgaggtaacggctcaccaaggcttcgatgcgtagccgacctgagagggtgatcggccacattggaactgagacacggtccagactcctacgggaggcagcagtggggaatattgcacaatgggggaaaccctgatgcagcaacgccgcgtgagtgatgaaggtcttcggatcgtaaaactctgtcttatgggacgataatgacggtaccataggaggaagccacggctaactacgtgccagcagccgcggtaatacgtaggtggcaagcgttgtccggatttactgggcgtaaaggatgtgtaggcggatatttaagtgagatgtgaaatccccgggcttaacttgggggctgcatttcaaactggatgtctggagtgcaggagaggaaggcagaattcctagtgtagcggtgaaatgcgtagagattaggaagaataccagtggcgaaggcggccttctggactgtaactgacgctgaggcatgaaagcgtggggagcaaacaggattagataccctggtagtccacgccgtaaacgatgaatactaggtgtaggaggtatcgactccttctgtgccgcagttaacacaataagtattccgcctgggaagtacggtcgcaagattaaaactcaaaggaattgacggggacccgcacaagcagcggagcatgtggtttaattcgaagcaacgcgaagaaccttacctagacttgacatctcctgaattagtccgtaatggatgaagtcccttcggggacaggatgacaggtggtgcatggttgtcgtcagctcgtgtcgtgagatgttgggttaagtcccgcaacgagcgcaacccttatcattagttgctaacatttagttgagcactctagtgagactgcccgggttaaccgggaggaaggtggggatgacgtcaaatcatcatgccccttatgtctagggctacacacgtgctacaatggtggggacaaaaagatgcaataccgcaaggtggagcaaaactcaaaaccccatcccagttcggattgtaggctgaaactcgcctacatgaagccggagttgctagtaatcgcgaatcagaatgtcgcggtgaatacgttcccgggtcttgtacacaccgcccgtcacaccatgagagtcggcaacacccgaagcccgtgaggtaaccttttggaaccagcggtcgaaggtggggttgataattggggtgaagtcgtaacaaggtagccgtaggagaacctgcggctggatcacctcctttctaaggagtcgacatggaaatgtaatttccatgaaggttctttgttctctgtttaattttgagagtttaattctctctaaatttgtactttgaaaattgcatagtaatcaatatagagtaatactctaaagcaaggcaaagttaattctttgttgtttgaatttaaatatatttacttaaggtcaagctacaaagggcgcatggtgaatgccttggcactaggagccgatgaaggacgtgataagctgcgataagcttcgggtaggcgcaaatagcctgtgaaccgaagatttccgaatgaggaaactctcatgggtaaccccatgaactgtatactgaattcataggtatatagaggtaaacccggggaactgaaacatctaagtacctggaggaagagaaagaaaaatcgatttccttagtagcggcgagcgaaacggaaagagcccaaaccggaaacttgtttccggggttgcggtcagatcattaaagctttatatcttaaccgaagatttctggaaagttaaaccatagaaggtaatagtcctgtaggtaaaaagagaaaaaagcccgatctgtaccagagtaccacgagacacgtgaaaccttgtgggaagctgggaggaccacctcccaaggctaaatactacctagtgaccgatagtgaagaagtaccgtgagggaaaggtgaaaagaaccccaggaggggagtgaaatagaacctgaaaccgtgtgtccacaaccgatcaaaacacgttaatgtgtgatgatgtgctttttgtagaacgagccagcgagttacggtatgcagcaaggttaagcacttaaggtgcgcagccgaagggaaaccaagtctgaatagggcgtatagttgcatgctgtagacccgaaaccgggtgacctatccatggccagggtgaagcggaagtaaaattccgtggaggcccgaaccacaatggtgttgaaaaaccatgggatgagctgtggataggggagaaattccaatcgaactcggatatagctggttctcctcgaaatagctttagggctagcgccatgaatgagtaccggaggtagagcactgaatgaggtaggggctgacaacagttaccgaactttatcaaactccgaatgctggatacttgaatcatggtagtcagactgcgaatgataagatccgtagtcaaaagggaaacagcccagatcaccagctaaggtcccaaagtatagattaagtggtaaaggatgtgggatttctaagacaactaggatgttggctcagaagcagccatacattaaaagagtgcgtaatagctcactagtcaagagatcctgcgccgaaaatgtccggggctaaaatctaacaccgaagctgtgaacttgtacttcgtacaagtggtagaggagcatcctgtatgggctgaagtcgtaccgaaaggagcggtggactgtacaggagagagtatgctggcataagtagcgagaactaagtgagaatcttagtggtcgaaaacctaaggtttcctggggaaggttcgtccgcccagggtaagtcgggacctaagccgaggccgaaaggcgtaggtgatggacaatcggttgatattccgataccgcagagtaacgttatgagaaatgggatgacgcaggaggataggatatgcgtacgttattggaagtacgtctaagcactgaggatgaaagataggaaaatccgtctttcgttaagtctggggtgtaatggtgaggtagtttactaccgaaatatctgatttcatgctgccaagaaaagtctctatccaggagctctgtgcccgtaccgcaaaccgacacaggtaggtgaggagagaatcctaagaccatcggaagaattgctgttaaggaactcggcaaattgaccccgtaacttcgggagaaggggtgcctacgagagtaggtcgcagagaataggcccaagcaactgtttatcaaaaacacaggtttctgctaaagcgaaagctgaagtataggagctgacgcctgcccggtgctggaaggttaaggggaatgcttagcgcaagcgaaggcatgaacttaagccccagtaaacggcggccgtaactataacggtcctaaggtagcgaaattccttgtcgggtaagttccgacccgcacgaatggcgtaatgatttgggcactgtctcaacagcaaatccggcgaaattgtagtgcaagtgaagatgcttgctacccgcgattggacggaaagaccccgtagagctttactgtatcttagcattgaatctcggtattgtctgtacagaataggtgggagacttggaagcagttccgtcagggattgtggagtcgtctttgggataccaccctgacagtactggggttctaaccggaggccatgaaactggtcacgggacatagctaggagggcagtttgactggggcggtcgcctcctaaaaagtaacggaggcgcccaaaggttccctcagcgcggttggaaaccgcgcgtagagtgcaaaggcagaagggagcctgactgcgacacaaacaagtggagcagagacgaaagtcgggcttagtgatccggtgacacctcgtgggagggtcatcgctcaacggataaaagctacctcggggataacaggctgatctcccccaagagtccacatcgacggggaggtttggcacctcgatgtcggctcgtcgcatcctggggctgaagtaggtcccaagggttgggctgttcgcccattaaagcggcacgcgagctgggttcagaacgtcgtgagacagttcggtccctatccgtcgcgggcgaaggaaatttgagaggagctgtccttagtacgagaggaccgggatggactgacctctggtgtaccagttgtcttaccaaaggcacggctgggtagctatgtcgggaagggataaacgctgaaggcatctaagcgtgaagcccacctcaagattagatttcccataacataagttagtaagacccctgtaagaacaacaggtgataggtcagaggtgtaagaatggtaacattttaagctgactgatactaataggtcgagggcttgaccaatataaaggtaaatatattaagattactatgcaattttgaaagtacaaagtgctttcaaaaactaaataaattaatccggtgaccatagcttggttgtaacacccgttcccataccgaacacgaaggttaagaaccaaagcgccgatggtactgcaggggcagccctgtgggagagtaggtcattgccgggtaaaatgttattccgcgatagctcaacggtggagcactcggctgttaaccgataggttgaaggttcgaatccttttcgcggagccattttattttttgacaattattttgtggctataaaattttaaaagaggtaatatttatgcgatggatttttttatacatatattttgttttttatatgattagaactacgtttttcaagataaaacttagttatataagaagaaatgccccagaacaagagtatgaagcagcagttcataaagtgatttttaattgggcaaaaacaatgcttagggttattggtgttaaagtgaatgtaaagggcatggaaaatataccaaaggatacatgtgtatttatttctaatcatcagagtaatgtagattttttggctataatgggcacaatcgataaacaaataggatttatagctaaaaaagaaattttgaaaataaaaattgtaagtagctggatgaaaatgatgcattgcgtgtttattgatagaaatgatatacgtaaatcgcttatggctataaatgaaggagtagataatttaaagaagggatattctatggcaatatttcctgaaggaacaagaagtaaaagtagtaatatgggagaatttaaaaaaggtagtttaaagcttgcaacaaaagctaatgcagtagttgttcctatcgcaatcgatggtggatatagactttttgaagatgttaagggaaagttaagaccaggagtggttaatatgtctatattagaaccgttaaatattgcagatttggataaagagcagaagatgaacttatctgatattcttcacaaaaaaataagtgaagagttgaagttaataaagcaggattaaattacatattttatatcaattttattttagataaaattaagggtactttaagaaggatttaaagtactcctttgttatataatgaatatagtttaatagtgaaattagaggatataggggggataatattagtttataattttaatattttagtatggatgagttaactcaattaaatggaattatatggtaaatgaaatgcgaatttttgaaaggaattataatatgaagataaagataaataatctaaaaaaaaagggccttgttgtatatattttattaattctattatttagattaatcttagctacaggacttagagtttgggcgtttggtgataatcaatatgatgatggaatgatgataaaaaatgctgctaatttgataggaggaaattggttaggtaaatatgatcaatacatatttgcaaagggaataacttttcccctttatttagatattatacatatgataggacttccgtttatttttgctaatgtactaatgtgctttgtggcatctttgacttttataatagttattaaaaaaataataccaaatattaatgcactagctataatttacacagtacttatgtttaatccaatagcatctgattcatggacacttcaaagagtgtatagggattcaatatacagttatcttgtagttatattattttctttaattatagctatatatttaaatcgaaggacatcttctagtaaattgctatgttttagtttgggagcaggattttttctatcagctgtttggcttgcaagagaagactcgccttgggtatctccatttgtcgctgtggctcttattgtaactgcagtactaatatttttggacaagaatttagaaattaaaatcagattaaagaaaattctttcacttacagtgattcctatatttcttatcataagtatactaactgtttcaacaataaattatacccattatggagtatttatgacaaatgaatatacaggtgggtatttgcctgaactgtttaaagagcttacaataataaaaccagacaagtggatgccacaggtacctataccaagatctacaagggaaaaggcttataaagtttcacctacttttgcaaagttgaaaaatactttggaaaatcatgcatttgtagctactacaccaggtggaaatgcttcatgctctatgttggcctgggcagttatagatagtacacaatggtatggattgaaagacgcaagatcgagtcaggaattttataaaaaatcttcagaggaaataaaggctgcaataaagtcaggaaagctaaaaacaagaggtgggtacatttttatgtttgaatctccttggaataacagctacataaaaccccttattagatctttaggagaaacattaagaatgactatacatatgagtaaatatgaaaacaagcctttatctaatttaaatatttcttcgtttggtacagatagtcagactagacaacttgaatatataacaaataatcttgcatattacaaaggtgaaaaaattccaaagcgtcagacaaagttgaatataatgaattcaattagtaatatatattataaggttaatccatttttcttctttgttggagttttaggatatgtgtatattttagtaaactttattttaaatgcaagaaagaaaaaatatgttcttggtgatgaattacttattttgacaggattatttttaagttatttcttaagactacttttaatatcatatacagatgtgtgttctatatttatgaaatttccaatgtatttagctcctagctattggcttgtacttatgtttacatttaccagcatatttgtatcagcaagatcaatagttaagtattgctttcattaaaaaaaaaaggtatgattatttataagaaactctaattaaatttagagttttcttttctagttagaaagctttattgaaaggaacttaataatgaatacaaaaatgcataataagaaaaaaaggattttctctatatatattctactgattttattaataaggttattcttatcaacaggggtaagaatttgggcatttggaaataatcaatatgatgatggaatgatgataaaaaatgctactaatctaattgcaggaaattggcttggaagttatgatcaatacatatttgcaaaaggtgtaacattccctatttatttagaattattacataagataggtattccatttattatttcaaatgttttaatgtgtttcgcggcttcgttaacatttataattgttataaaaaaggtaataccaaatttaaatgcgcttgctataatttatactattttaatgttcaatccgatagctactgcttcttggacttttcaaagggtatacagagattctttatacagttatttaattgtaattttattttctttgattataggaatatatttgaataggaaagagtcttttaataagttattaagctacagtatagttgcaggatttttcttatcatccgtttggcttgcgagagaggattcgccatgggtcttaccgtttgttggtatggcattaattgtaacactagtacttatatttttggataaaaattcagaaatgaaggttagaatgaaaaaagctttggcgttaacagtcattcctatttttcttatagtaagtatattagtagtttccacaataaattatacacgttatggtgtagctataactaatgagtatacagggggctatttgcctaggctatttaaagatttaactataatacaaccagatgaatggatggctcaggttcctataccaaagtcaacgagagaaaaagcttataaagtatcgcctactttttccaagctaaaaaatacattagaaaatcatgcatttgtagctactacaccaggaggaaatgcatcttgctcaatgttggcttgggctgtcattgacagtgttcagtggtacggaattaaagatgcaaaatcaagccaagagttttacaagaaatcttcagaagaaatagaagctgcaataaagtcgggaaaattaaaaacaaggggcggatatatttttatgtttgaatctccttgggataatagatatgttaagccgctgcttaaatcatttattcagaccattaaaactactgttcatatgggacaatattataatatggaggaagaaagtcttgttaagacacttcaattaagtaggaaatataacaatacaattgtacctttgtttgaaaaaaacatagcgagtattggaacaaaagaacaagtaagaaagttagaatatataacaaataatattgcttataataaagaggatgttatacctaaaagacaaacaaaggtagctataagcaataaaattagtttaatttattatgaattgaatccgtatttgtttttaattggtctaaataggttatgtgtatattacactgcgctttttactaagtataagaaagaaaaaatactttttagctgatgagtggctaattacaactgggatatttttaagctatttgcttcgattgctcttaatatcttatactgatgtttgttctatatttatgcagtactccatgtacttagctcctagttattggttgatacttatgtttacttttactagtatatttatttccatgagagattttgttaagaactactattataataaaaaagcaagccataaaaattaatttttatggcttatttttttattatgtagaaatataatagctgtttttagtataattaatctatagaatttatgttttcgattaaaaggaattctattgaataaactttttgttttagggaattattattttctactaacttatctaaactttttttatagtctatattaaaagtttctagttgtttaagttttttctctaattcgattattttctcctgcttttcggttattaggtgggagtacatttcattaattaaagttgttttttctgaattgaattttatttcttttattaccttattagctttagtatttgtatctttcaaaattttctgaattggattatccataatactatccccccttttgcatggtatataaatctattatatgttaataattaagattaataaaggagaaatctatggataaaaataaacttgtaaataaatttctgcaaatgaaggaaactgaaaataaaagattggatgaaaacattactaatctcgagcaatcattagaaaaattagataaggagaataaagagctttacaaaaagcttaaggaagaaaggttaagaaatgctatacttagcaatcgatacggaatgctcttagatgatataaaagaagagggaattatatttaaaattaaaaatacaaatttgggtgtagttgagtggcaaaacttatattttagggatagtggcaaaaatatttatatcgaaagtttggataggcatttgatacatgagtttgataacaatatgagcagcttaataagaatactaataaaagaaaatgaatatagtcttattgtaataagaatgaatgaaaaaaatgtaaaaattcaatttagggtaattgaaaaacaagataaaaatataacataatgaaaaagttagcaaacatttagaagtttgctaactttttttattatattattgattttaagttaataaattgatatacaattttaaaattaaaatgcaaaatgaaatatcaacaacttaattattcaaaaaatatttattataaattgaaaatgttgctttaatatgttaatatatattatattgattgataatgtatactataatcctaacaaataacagggtttatagagattgacttaaaaaaagtaaaaatgaatttattattataaataattctattgagtgaattatgaaggattgtaaaaataaaaatcattttaaaaaatatagtaggaagtgattttatgaaagaactaaatctaaaagatgttgaggagccaaatttgtatagggatatttttccgtaccatgaagttccaaaaattaaatttagtacagatgaaataaaagtagatataccagatgaaatatggataactgatacaacctttagagatggacaacaatccatgacaccatttacagttgaacagatagttacgatttttgactatctaaacaaattagataataatacaggggttataagacaaactgaattctttttatatacaaatcgggataaagaagccttaatggaatgtatgaatagaggatacaagttcccacagataactacctggattagagctaataaagatgattttaaacttgttaaggatattggaatcaaagaaacaggaattttaatgtcttgctcagactatcatattttcaaaaaattaaagatgactagaacagaaacttacaataaatatgtagagatagttgaagaggctctttctaacggtatagttcctagatgtcatctcgaggatattacaagagctgatttctttggatttgtggttccgctcgtaaataagcttatggagctttcaaataagtatggaattcaagttaaaataagagcgtgtgataccttggggttaggagttgcgtttccaggtgtagaacttccaagaagtgttccagcaataataagtggacttagaaagtactgtggtgtaccatcaacagcacttgaatggcatggtcataatgatttttactatgttgtgccaaatgctacggctgcatggctgcatggatgttccgctgtaaataccacccttttaggaataggagagaggactggaaactgtcctttagaaggaatggtatttcaatattgccaacttaaaggcaatccgggaatgaatcttcatgcaataactgagatgtccaaatattttgagaatagcatgaaatatgaaataccacctagaacaccttttgtcggtactgattttaatgttacaagagcaggtattcatgctgatggtattttaaaagatcaggagatatataatatatttgatacagagaaaattcttgatagaccagtgcttgtagctgttaatgagtattcaggtttagctggaatagcagcttggattaatacctactttaagctaaataaagaaaatgaagtagataagaaggatagcagggttgcggaaattaaaaaatgggtagataatttatatgaaaatggaaggacaactccaataacaaataaagaacttgaaatagaggcaaaaatgtattttaaagagttaattgatgttgaaaatacaagagccagttaaaatattaaggagagatttagatgggactaacattaactgaaaaaataataaagagtcatttggtatcaggagaaatgacaaaaggcaatgaaataggaataagaattgataatactcttactcaggattcaacaggtactatggcatatttgcagtttgaagcacttggaatagatcaggtgaaaacaaagagatctgttgcatatatagatcataatatacttcaaacggggcctgaaaatgctgatgatcatttatatatacaaacagtagctaaaaagcatggtatatatttttcaaaaccaggaaatggaatatgccatcaggttaatctagaaagatttgatgttccaggagaaactttaattggatcagatagtcatacacctacagctggcggaatgggaatgcttgcaataggtgcaggaggtcttgatgtggcagttgctatgggcggtggtgaatattatataataaatccgaaggtagttaaggttaatttaaaaggaaagcttaactcaatggtttcagcaaaggatataatattagaagttttaagacaagttacagtaaaaggtggcgttggaaaggtatttgagtattgtggagaaggcgttaaatctctctctatacctgaaagggcgactatttgtaatatgggagctgagcttggggctacaacttctattttccctagtgatgaaaaaacaaaagagtttttacaggctcaaggaagagtagaagattttaaggaactttcgccagattctgatgctgtatacgatgaagaagttgttgttgatttggataagcttgagcctttagtagcgtgtcctcatagtcctgataaagtggagaaggtttctgaaataaaaaatattaaggtgaatcaaatagccataggaagttgtacaaattcatccttccttgatttgatgagagtttccgaaatactaaaaggtaagactattcatgaagatgtatctttagttatagctccaggttcaaagcaagttttaactatgatgtctaagaatggagcacttgcaaatcttgtttcggcaggtgcaagaatacttgaatgtgcatgtggaccatgtataggtatggggcaatcaccttcaacagatgcagtttctcttagaacatttaataggaattttgaaggaagatcaggaactgtttcagctaaagtttatcttgttagtcctgaaactgcagctgtttctgcattaacaggggttttaacagatccaagagaactaaaagaaaatatagaaaaaatagaaataccagagaagtttttaattaatgataacttgatagtaagtccttcagaaaatccagaagaagttgaaatagtaagaggacctaatataaaaccattccctaaggcaaagccacttgcaagtgagcttcatggtaaagcacttattaaagttgaggataatataacaacagatcacattatgccatcaaatgcaaaattattgccatttagatctaacattcctcacttagctgatttttgtttgacaccttgcgataaggaatttcctaagaatgcaaaagaaaataatggtggatttataatagctggttcgaattatggtcaggggtctagtagagaacatgcagcacttgctccactgtatcttgggataaaggcagttcttgctaaatcatttgcaagaatacacaaggctaatctaatcaataatggtattatacctcttgtttttgaaaatgaagctgattatgataaaatagataaaaatgatgaacttcagataaatgatactataaatcaggttcaaacaggttttgtatatgttgaaaatatatctaaaaattcaaagtataaaatgattctagatataccagaaagacaaaaggatatgcttatatgtggtggaaaattaaatcagataaaaaaagacacaaaataaaatagggctttatgccctttcaatttttgcataaatataaaattttatattggaggtacagcattcatgaaaaaaaatcacacaataactcttattcctggagatggaataggaccagaagtaacgggggcagctaaaaaggtaatagaggcagcaggagttagtataacttgggatatagttgaagcgggagcaaaggttatggatgagtatggaacacctcttccagagtatgtgttagaaagcataaaaaagaataaaatagcactcaaaggacctataacaactcctgttggaagtggatttagaagtgtaaatgttgcattaagacaaacttttaatttatatgcaaatgtaagacctataaagacatatgaaggaatacctacaagatacaaagatgtagatctaattatagttcgtgaaaatacagaagatttatatgcaggaattgaacacaaaattggtgattatgcagctgaaagtattaagataataactagagaagcaagtgaaagaattgctgattttgctttcgatatggcagttaaacaaaatagaaaaaaggtaacagcagtacataaggctaatataatgaaattttctgatggactgtttttagattgtgcaagaaaagtagcagaaggttataaggaaaaagaatttgaagatatgattgttgatgctatgagtatgaaattagttcaaaatcctgaaaagtatgatgttcttgtaatgcctaatctttatggagatatactgtcagatatggctgcaggacttgttggaggacttggagtagcgccaggagcaaatataggaaaagaaatttcgatatttgaatcaattcatggttcagcacctgatatagcaggtaagaacatagcaaatccaacagctgctatactttctggagtaatgatgcttagatatataggggaacttgaagcagcagataagatagataatgcaattaaagtggttttaaaagagggaactaaggttacatctgatttaggtggaaatgctacaactgatgaatttgctaatgaagttataaagaatatataataattagataaaaaataagagctaagttattggctcttattttttttatgaatatttataaaatatattgcataattataagaaaagatttataataataccataagaaatcacgaagagtatataaaattatgacttataaatagtattcatgaaaggtgtctgatagtatgaaagagaaagttgtgttagcttattcaggtggacttgatacgtctgtaacaattccatggcttaaagataattatgatgttgaggtaatagctgtatgtgttaacgtaggacaagaagatgatatggataaagttaaagaaaaagctgtaaatagtggagcggctaaaatatatgttgaagatgttaaagaggaatttgtgactgagtatttatacaatgccataaagtggaatgccacttatgaaggaaaatatcttttgggaacttcctttgctagacctttaattgcaaagaagctagttgaagttgcacataaagaaggagctaaatatatatgtcatggctgtacaggaaaaggaaacgatcaagtgcgttttgaaacggctattgcagcaatggatccctacattaagataattgctccatggagactttggaatatagattcacgagaagcagaaatagattatgcattatcaaaaggagtagaggttccagtaacaaaggagaagatttattccgaggactggaatttatggcatataagtcacgaaggtggggatttggaagatcctaaaaatgagcataaggaagaaatgtataaatgtgttactccacctgaagaagcaaaggatgaaccagcatatataagcatatattttgaaaagggtgtaccatgtaaaataaatggagaagagctagagcctgttaagcttattgaaaaggtaaataaagtggcaggagaaaatggtataggagttgtagatcttgttgagaacagacttgttggaatgaagtccagaggagtatatgagacgccagggggaactcttctttatgaagcacatgctcaacttgagagactaactgtagataaggatgcatatcactataagcaagtacttgcgcttaagtattcagagcttgtatatgatggtttatggtttacgacaacaagagaggcgcttgatgcatttgttgatacagttgaagaaaatgtgacaggtacagtaaagcttaaattatataagggaaatatgaaagtctctagtgttgagtctgaaaatgcattgtatgatgagggaatatcatcttttggggcaagtgatttatatgatcacaaagatgcgcaaggatttataaatttattcagccttccaagcaaaataaaagctatgaagaagttggagaagaaataatgaagctttggggtggaaggtttagagaaagtgaaagcgagcttatggaggaatttaatgcgtctttaagctttgataagaaactatatgaagaagatatagaaggaagtattgctcatgtaaaaatgctgaataaatgcaaaataataaataatgaagaatgtgaagaaatattaagtggacttaaatccttatataaagatataagaagtggaaaattgaaaattgaaggggactatgaagatatacacagttttgtggaagtaaacttaatagatagaattggggcagttggaaaaaaacttcacaccgcaagaagtagaaatgatcaagtggctgtggatatgaaaatgtatgttaaaaagagctcttatattataattgagtgcataaataagcttatggagacaataaaggataaagcagaaaataatcactttataatgccgggctatacccatatgcaaagagcacaggtagttacctttactcaccatatgatggcttattacagcatgtttaatagggataaaaaaagaatagacaatgctatttctaatttgaatgaaagtccacttggctgctgcgctcttgcaggtacaacttatgatacagatagagaaatgacctctaaagaacttggtttttctaaaccagtagataattttttagatggggtaagtgatagagactatataatagaagtgctgtcggcattttctatatgtatgatgcacttaagcagattaagtgaagaactcataatatggagcactaaagagtttagttttattcaaatggatgataaattttcaacaggaagcagtataatgcctcaaaagaaaaatccagatgcggctgaacttatacgtggaaaaacaggaagagtttatggtgatttaatagcaatgttaacaatcatgaagggaatacctttagcatataataaagatatgcaggaagataaagaacagttctttgactcctttgatacactaaagatgtgtattttagtcatggatggtatgattgcaacaatgactgtaaaaaaagaggctatgaaggaagctgtaaaaggtggatttttaaatgcaacagatgtggcagattatctggtaaacaagggagtagcttttagagatgcccataaaatatcaggagagcttgtaatatactgcgaaaataatgataaagctattgaagaattaaatattaatgaatttaaaaatttctgtaatctatttgatgaagatgtttatgaatttataaattataacaatgttattaaaaagggaaataaaaaaataatgtaaagcatagggttttcttaggtatccttttatgtactaaaaatggggcagtgcataaatgttaaaggattataggaaaaccctatacatatttatattttaaaagcaagtttacattatggaataatattacttttatggtataatacacaatgttgatataaaaattaatactaaataattaaattgattttttattgggggcgagggataaaaatgcaaaaggaattttctattagtaatgataaggttttaattaattttacagctaagtattgtaatacatctgaaaaaatattaaacagttatggctttagaaagatattagagaggtttataaaaaagggaagacataaaacttctaattattataagtatatagaagaaaatatgatagaggacaatgaaaataaaatagtaaatgaccttatacaggtatttaagcttcttttggtttttaaaagagaagagataataaaaacaaatccaaagtatgaaagctttttatcaaatcaggatgagattattaagataatagaagacatatatggattttggagaaaactcgaacgatatacagtaattcataatagtagaataaatgatggacttgaaaatgttagctttgtagattcaaatattcaattttcgcagcttataattaacacttatagaagaattgaagagaatgctttaggcataaaaccgaaagtttacagacaacttccggcaggtgctaatgcaggcattattgttaatagtataaaatggaagtatccagaagggtatgaatgccttaatggtgtacctattatagattctgtgcttatagatcctccatttatatcatatcccaaaaaaataaagagagatggagtattttcagaggtatttgaaaaccctcttaaggataaaataaatagagatcattggttttgctttcctgcaaaaataggaacacttcttgcatttatttattttcatagagactttatggctcatggaataactttatgcaatctatttgaaatagctaaagaaaatgagtataaagatacaaagccagatatagtatttgtctttggggcaagagataatatagagaatacacgcactatattttacgatgataaggaaaatgacataatgctcggatatattaattacagtgctaatattgactactttggctatatgaagaagatggcccttaccttgcataatttaataatgataaaaagggggtatcttccaatacatggtgctatggttaatattgttgcaaaagacggtagtgatgttaatatagttataatgggagatagtggtgcaggaaaatcggaaagccttgaggcatttagagaattaggtgaagaatatattagtgatatgacagtaatatttgacgatatgggtgttgtaaagcctaatccatctaatgataaacctatgggctatggaactgagataggagcgtttgttagactcgatgatctcgatccaggatatgcttttagagaaattgatagaagtatatttatgaatcctgacaaaacgaatgcaaggcttgttataccagttgccagttatagtgacataattaagggctaccctatagatttatttctatacgctaacaattatgataagtctggagatgaactttccttctttaattcaccagaagaagccgttaaagtttttagaagtggaatcagaatggcaaaggaaactactacagaaaagggtcttgttacaacattttttgcaaatccttttggaccagtacagaaagaaaaggaaacagacaaacttataaacaaatattttgataagttttttgaaacaggagtaaaggtaggtcaaataagaacccgtcttggcataaagggtatggagaagagtggacctaaaaatgcagcaataaaacttctagaggcaataaaaaaaatgtaaataatagtgcagaaccatattaaatgtggtctgcactattatctatatttaatttttaaaaactatttttcaacttttgcttctctgtctcttcctaaaaatgatattgcatataatccacatatacctactattgcatatattattcttgttaaagaggacatggttccgaataatgcggcaactaaatcaaagctaaagaatccaattagaccccaatttatagcgccgactatgacaaaaaccaatgcgataatatctaatgttttcatcatcgacatctccttttattagtttttacagaattattatatgcaaaagagtagcgattatgttagaaaataaacttaatttaagaaaaatctacatttctgtctattggttgagaaagtgccatgaaagtattagttctttgaactccttctacaacctgtattctgttaagtaaaagatcttgaaggtcagctatacttctacagactacttttgcgaaaattgaaaattcacctgtaatataataaagttcaactatttcttttatatctctcattgcttcaagtactttgggatatgaagcagccttgtcgatatatattccaactaaacagcaaatatcatatcctaatttagtgttgtctactataagctttgtaccctttatgattcccatgtcttccatttttttcattctaacatgaatagttccaccgcttacgtgacattctcttgctatctccaaataaggtgttctcgaatcctcaaccaaaatatgtaatatttgtaaatccaaatcatccaatccattaacttgtaaattcattaaaatcaactcctataagttatagtaaacaacaatattataacaaattcaataccattttatcaaaataattataaaaaatattataaaattatagtattttattagaattatatttggtgtataatttaaatgtatgtacttgattgggggattcttatgtatattaatgaaaaagacataaagttagagatagacaaaaacatagtaaaagagtatagtatgaagtcaatggtttactttgatatagaaacaacaggatttgatagagaacaggataacataatattaatatctataggatactatgatgtaaaagatacttttcatataaaacagtattttgcagaagatttaaatgaagagaaatatgttttagaaaatttaaagggcgatatagagaacttcaatatgtggtgttcatacaatggtaaagcttttgatgaaccatttatacaatcaagaatgaaaaaatataatattgaactcacattgccaagagaacattttgatttatatagaaaaataagaccttatcaaaaacagcttggacttgaaagatgtaatttaaaaagtgtcgaacagtatataggtattaaaagagaagatactattgatggtggaattagtgttgagttatataaaaaatacctaagggataaagatgaagaattaaaatatactattatgcttcataattatgaggatgtattaaatctacctaaaatatttaaaatactttggaagataaagaaatgtgatttcataagagaggatcatattactgataagcagcttaaatatttgaactatttaatgaaaaagcataatgtactagtagatattaatttggataaaatatccaaaagagcagcatcaaaagctattggtgctatattagacggagattatgatataataagtataaaggatataataaaaaacaattgtgtataaatacaggagaatgctgcaaaagcttaggttatacatgatgaaatgtaagtcttttatcatttataacttaatatgatgtagtttttcatatgttaacaaaatttaagagaatggagacaggaatatggtaataaaggatatgatgattaaaaatgttgtaaaagttaaggatagtgatactttaaaagatgcacttaaagtaatgataaacaatactgtaaatagtgcaccagtagtagataataatgatgagattgttggaatagtagttaaagcagacatatatagattcctaatagaagagggacactatgatacttatccagtagaagctgttatgacaaggaaagtaataactgtcgatgtaaatacggatctaatggaagttggaaaaattttaagagataatagtatatttgcagttcctatagttgaagataaaaaagcaataggacttgttacggtagaagatttacttgattattttttgaagaatagttagtacacttaatttcgagaataaagcgtattgacacttagatagaaatatgatattttataataaatgatttaagaatcgtataaccggcggaagtggaataaccacagggagtacgattttaaaaagccgaccgcctgggcaaaaagaaatgtccaggtggtttttcttttacctctggataaattaagtaattgaaaataaaatttcaagaataatgaaaaatttaaaatgaaggagagtttttgtatgattaaagaatggaacgattttaaagaaggtacatgggttaataatattgatgtaagaaattttatacaaaaaaattatacaccatacttaggaaacgaggattttttacaaggtgttactgatagaacaaagggtctttggaacaagtgcgagaaacttctcttagatgaaataaaaaatcaaggtatattaaaagcagataacaaaactgtatcaggaataaatagctttgaagctggatatatagataaagaaaatgagattatttatggacttcaaacagatgaaccacttaaaagaatggtaaatccttttggtggtataagaatggccaagcaagcattagaagcatatggatacgaaattgatgaggatgtatacaatatatttacaaagtataggaaaactcacaatgaaggtgtttttgatgcttacactgaagaaatgaaaacagctagacatgtaggattattaacaggacttcctgatgcgtatggaagaggtaggataataggagattttagaagagtagcactatatggtattgattgcttaattgaaaacaaaaaagctgatttaaaagaattaaaaggcgacatgactgaagatttaataagaagaagagaagaagtttctgaacagataaaggcgttaaaagaaatgaaagcaatggcattaaaatatggaatagatatatcaaaaccagcagctaattcaagacaagcagttcagtttacttaccttggatatcttgctggaataaaagaaaataatggagcagcgatgtctcttggaagagtttcaacatttttggacatatatatagaaagagatttaaaaaatggagtaataacagaaaaggaagctcaagaaattatagatcaatttataataaagttaagacttgaaagacatctaagaactccagagtacaatgaactatttgcaggtgatcctaattgggttactgagtctataggtggaatgggtatgaatggagaaaccttggttacaaaaaattcttttagatttcttcattcattaacaaatcttggacctgcacctgaacctaatatgactgttttgtggtcaaataatcttccagagccatttaagaaatactgttctaagatgtccataaaaacagatgcaattcaatatgaaaatgatgatataatgagacctatatatggtgatgattatggaatagcctgctgtgtatctgcaatgaagataggaaagcaaatgcaattctttggagctagatgtaaccttgcaaaatcattattgtatgctataaatggtggagtagatgaaaagaaatttgatttagtagttcctcacattaaaagaatagatgatgaagtgctagactatgataaggttaaggaaaactactttaaggttatgaaatatgtagctaaactatatgtaaatactcttaatttaatacactatatgcatgataaatatgcttatgagaaaggacttatggcgcttcatgatacagatgttcatagatttttggcttgtggagcagcaggactttctgtagcagttgattctttaagtgcaataaaatatgcaaaagtaaagcctattagaaatgaagatggaatagctgtagattttgaagtagaaggagatttccctaagtatggaaatgacgatgacagagttgatgatattgcagttgagatagtcaataaatttatgtcagagttaagaaagaccgctgcttatagaaatgcagaacatacattatcaatgttaactataacttcaaatgtaatgtatggtaagaaaacaggagcaacacctgatggaagaaagtctggagaggcatttgcaccaggagcaaatcctatgcatggaagagataaaaatggagcattggcatctttaaatagtgttgctaagattccatatagaagtgtatgtcaagatggagtttcaaatacattttcaattattccagatgcacttggaaagaatgaagaaacaagagcaaataatttatcagctattttagatggatattttgaaaagggagctcatcacttaaatgtaaatgtgcttaatcgtgaaactcttctagatgcaatggaaaatccagagaaatatcctacacttacaataagagtatcaggatatgcagttaactttgtaaaacttacaaaagaacagcaaatggaagttgttaagagaacattccacggaagaatgtagaggtgttaatttgggaaaaattcattctatagaaaccatgggtttagttgatggaccgggaataagagttgttgtgttttttcaaggatgcaggcttaggtgtgcattctgccataacccagatacttggaatgttaattctggtgaggaaatttcagctgaagagttaatgttaaaggttaaaaggtataaaaactatttcgataaatctgggggtggagttacatgttctggaggagaaccattaatgcagccagaatttttattagagtttttaaagttatgcaaggaaaatggaataaatacagtagttgatacagcaggttttggatgtggtagttatgaagaaattttaaaatatacagatcttgtattacttgatataaagcatataaatgatacgggatataaagatttagttcttggaaatattaaagaattttataggtttgtcgataaggttaatgatttaaaagtaactacatgggtaagacatgttatggttccaggtataacagataattatgatagcatggataaattagttgatataataaagaagatagataaagtagaaaagtttgaaattcttccttatcatacgctaggagtaaaaaagtatgataagcttggaattgaatataaacttaagggaataaaagatatggataaaaaaatagctgctgaatttgagcagtatgtttgtgaaaaattgaaagtttaaacttatatagggtttctatataaaaatgtatagaaaccctataataaaatactatttaatttctttatgtggcaagcagttgctgcaggattttgagcctgagcagcaattacattcaccttttgctccttttttaaagtttttataaaaaacatataaggctgcacttattataagaagtgttattattatttcaataatcatagaactcaactcccttttaatatgtatagataatagcaatgaatatcattttcaattaaatagtatcatttaatcagattgatgtcaactggcggctactcaacaaaaacaagagtttttataattgatgttaatatttatgttgaattatgatataatacatatgagataggtaactatacataaattcgaagggggaatttatatggtattggcctctaagtctgatatcagtgataggcataaggtttataaatataaaacagaaaaaagaggtaaaaatagaaagagaatagacttagaaatctcatatcctagaataaatgatgagagcgtatatgaaaaatataaggatagggagccaatattaaagtcagttaacatatcagaatctggaatatgctttaaaagcagaatgctattaaggtcaggagattttgtgagttttcttcttaatattgagagaaaaccatcattttggtgtctttcggtggttagatggacaggctgtaatgataattcttatgtaatcggttgtgaatttgtttcactaaccttgcagcaaataaagacgatacgtaattttgtcgatgaggattagagattagaatttgattatttagtgttagccttaagtaggtgatataatttccttttaaggcattatttttgaattaaatcatattatttaaattggaaatatatgaattgcgtataaaaaagactaaattcatattgacatttaaatatatactaactataatattaaataaagaaattaataaattagtgcacttatcaagagaggtggagggaccggccctgtgaagcccagcaacctgtatatgttaattatacaaggtgctaattcctgcagcgctagctgagagatgagaatataaatcgagcttttagagccagagtttattctctggctcttattattttttaatctaatgggaaaaggtgaatgacatgatagaaataaaaaatgtttctaaatatttttcaggaaataaggttcttaaagatgttgatctgaagattaaaggcggagaaatatttggaattgttggtcatagtggagctggaaagtcaacattacttagatgtattaatgggcttgaaacttatgatgaaggaaatgtaatagtttttggaaaagacttgaagcaaattaatggaaaaaatctccgagaatttaggaaagaagttggaatgatatttcaaaacttcaatttgcttaatagaaaagatgtatatcataatatatctttgccgcttgaagtttggggagtacctaaaaatgaaatagcttcaagagttaaagagcttttggaacttgttgatttaactgacaagatacacagtaagccttcaaacttaagtggaggtcaaaaacagagagtagctattgcaagagcgttagcattaaaccctaagatattactgtgtgatgaagctacatctgcattagatcctaatactacaaaatcaatactaaatttgttaagaacaatcaattctaaacttggtataacaatagttattgttacacatcaaatggaagttgttaaaggtatatgtgaaagagtcgcactaattgatgctggggttataaaagaaactggagacgtagagaacttatttttaaatccaagcagtgagatgaagaaacttataggacaaagtgacgatgatgtacttcctaaggaggggataaacataagagttatattccctaagaatagcagtgaaggtgcacttataacatcaatggcaagagaactcaatgtggatttttcaattgtatggggtaaacttgaaagatttagagatgatgttttgggaagtttagttataaacatttcagaagaaaacaaagaagttatatgtaattatttggtttcacataatgcaatttgggaggtggcataatgagtacaacagatatattaaaacagattttgttaccttcactttgggaaacaatttatatggtttttgtatctaccttatttgctataataattggatttataccagctataatacttgttgtaacagatgaaaatggcttaaagccaaataaaattgtatataaaatattagattttataataaatatgttaagatcttttccgtttttaattcttatgattgcgatattcccattcacaaaattaattacaggaaaacaaataggtacaacagcagcgatagttccattaacaattggagcatttccatttgcagctagagttatagaatcttcacttaaggaggtggacacaggaataattgaagctgctaaatcttttggggcaagtaattttcaaatcatatttaaagttatgataaaagaggccatgccatctattgttttaggaattactcttacagttattaatataataggatattcagctatggcaggtgcaataggcggtggcggacttggagctgctgcaatgcagtatgggtataatatgtttaacaccacagtaatggtttatacagtaataatacttatgattatagttcaaattttacaatcacttggaaactttgtttataaattaatggttaaataaataaaaaatagggggaaaaattatgaagaaaaaatttttatcagtacttttatcaggagcagttttaataggagctttaacaggatgcagttcaagtacaagcagtagtacaagcagcaatgataagaaaacaatagtagtaggagcaacagcagttccacatgcagaaatattgaataatgctgtaaaaccacttctaaaaaaggaagggtatacattaaaagtaaaggtatttactgattatgttactccaaatacagctcttaatgatggagacttggatgcaaactacttccagcacgtaccttacttagaaactttcaataaggaaaaacatatggatttaacttatacagttaaagttcatattgagcctatgggattatactcacataaaattaaaaagttaagtgaacttaaagatggtgatgaaatagctgttccaaatgattcaacgaacgaatcaagagcacttaaaatattagagcaaaatggaattataaaattaaaaaaggctgaccttgttacaaaacttgatataattgagaacaagaagaatataaaaataaaagagttagatgcagcacagctcccaagggtacttgatgatgtaacagcttcaataattaattctaattatgcattacaagcgaatctaaatcctacaaaggatgcaattgtttcagagcctaaagatgcaccatatgcaaatgttcttgcagtaagaaagcaagataaggataaaccttatataaaagctttaaataaagcattaacatcaccagaggttaagaaatatattaatgataaatataagggtgaggtagtgcctgcattctaattttagatatacattacagttattagtttttagtatatataaggcctcaattttatattggttaaaagaaggttttaaaaccttcttttgttttttgaattttatacacattgataattaaaaaatgctaatattatgtagtagaatacattaacaatataaaggtacatcataggtattttagaaagcaatattaatatttgatgaaaaaaattacattatatggtataatgaattagattaaaaataagtaagctattaatttgtagggtttagaagttaattggcatattataacagtaagactaaatcaagaaagtatttggtttactgaataagcaaaaagagagtgataattttgattaagagaaatgctgtaacgagcttaaaagtcaatgatgttgataggttcaaattggaagatagtgataaaatatattctaaggctctattttttgatttagagcattatgtttataaaaaacctatatgtattggagtatttggatgtgcttactttgatgaaaaatcaggtgagttaaatacaactcaatatatgatagaaaataaaagtgattcagaaagaatactaaaaattgcagaagaatattttttaaaagctaaaactgaattaaaaaaagactatattgttactttttcaggtaataatgattttacagttataaattatttatttaaaaaaagtaatataaacatggaagtgaataaggaatttataagcatagatttgcaaaaggaatatgaaaaagtaacaaagagatgtgtaggacttaagaatcttgaaaaaatatttgagataaatagagaaagtgagattataagtggatctacattggcaaagacatttggtaagatagttaaggattcggaatattcattaagaatgccgtctgataaaaaggataaaatacttctttacaatagacaggatgttgagagtttattcaacatgattgttacctggaacaaatatgtaaaggaagtagaagatgacgaaaaataatattttaaataacaaaattactaaggtaatattatttagaatatgctttataattgccattaccacagctttagtttgcggattaaagctaaatataataaatgatggtttttggcatataaaagttggtgagtatataattaaaaatagggttataccacgtgaggatatattttcatggtacggaattgaaaataaacttaaatggataagtcacgaatggctttttggggttatagcttatttggtatataaaattaaagggtttacctctgtaataattttttctaccatagtaaattgcagcacagctttactagtatataaatttgcactaataagaaataaaaataaagtagtatccttaataataatgtgggtttacatatttggtgacttttatgatattacatatagacccgttttaatatcaaaacttatactcttgtgtagttttatattgttagagaaaaagaaatacttatttgcattgattgttttaatattgggggttaatattcatgggggtatttatcctctttatttaatgatttttgcatactacactataccatttagttataagtatttaatttttagtctaattactgtgcttataaatccatatggatataatctttataagtatacgtatttatcgatgaaaaatatagatataaataggtatataaatgagtggtgtataactcctatatatgactataaagttgccttaattataatatgtattacggtttgtatctgtacagtatctaaaatcaaatttaaggattttttgttttgtggagcattaataattttagctataagcgctaaaaggcatgtggatgtaatatatttgttcgtacttccagttatatccttatactttaatagcttttatttcgatttttttatgaaatttgtttcaagaataaaacctgaaaaattaaaatctataataccaaaattaaattacataacctgtgggttcctcatagtagttatgattgttaaatcttctttatgcataaagcaatatttttttgatactcatttccataattttgaatatattacaaatgattcagaaaatccaataaaagcatgtaattttataaattcacatcaggagataaaaaactctagaacatttaacgattataacagcagtccatatattatatttagaggaataaaaacttttgtggattcacgtcaggatttgtttacttacaattttaataaaacaaatgcatttgtagatcagattaaagctttaaataattatgattacatgatttatgtatttaaaaagtacaatatcaagtatgcaattttaagaaacgacatgcctaatacaagactacttaggaatactgatttaatttatataatatatgaggatagggactattctatttttcaaattaatagaaataaacttaagagtagcaatcaacgaggtgtataagttaaagtataatggttataattgaaaataaataaaattttgttaaattacggagatgaaattcaaagtgaaaaatagaattaataataaaggatttacacttattgagttaataattgttattgctattcttgctattttagcagccattttggtaccatccatttcggcgtataaaataaaagcggagaaatcaaatatacaagcaagtgctaggacacttagtcatgctattgatgcatacaatgcagataactcggacaatacaataaattcctatgataccaatgcccaaacacttattggagatgatataaagccagataaggtacctgattgtctaaagggaaaaacaaaggatgatattgataatatagcttcaggaaaattcactgtaactaaggaagatggattaaaaacagtgattagtttaacatcaaattaataacacacatatgttttgcatatgtgtgttattttctactatttctctaatttttcaattcctatttttattcttcttatagattcatcttttcctattatatctgcaatttcaaaagcaccaccaggagtgaatttctttccagaaagagcagttcttaaaggccacaatacaacgccattttttacacctaaatctttgatgtaattcattattgtattttggatgttatctaaattccagtcctctatattttctataacaggaaggcaattttttaagctgtccaatgatatttcagggttagttttcatctttttgtgagtgtacatttctatatcataatcagggagctcattaaagaaatccaccatttcaggaatgtcactaaaaatttctacccttgtttgaattaattcacttattttctttaaatctatgttttcttttgttataactccatcataataagaaagtgcagccttatgaaattcatcaagactaagctttcttacatactctccattcatccactttaatttaactgggtcaaatacagctggagatttatttatgtgagtgtaatcaaataacttaaccatatcttcaagagataatatttcattagttccttcaggattccaacctaaaagtgcaatataatttaatactgcttctttaagatatcctttttcaattaaatcctggaaggaagcatcgccgtttcttttacttagtttactatgcgcatccttcattattggaggacaatgtacatatattggtacattccaaccaaaagcctcgtatagtctattgtattttggagctgaagataaatattcatttccacgtacaacatgagttattcccattaaatgatcgtctacaacattggcaaagttatatgttggatatccatctgattttattaaaatcatgtcatcaagttctgaattatcaacagaaattcttccgtatataacatcgtcaaaggtagtagagcctgtagttgggttattttgtcttataacataaggaactccagcatcaagtttttcttgaacttcttcctttgataagttagcgcaatgtttgtcatacttaaaaggtctttttaaagcctctgaatttgtttttaaaatatctagtctttctttagagcagaagcagtaataagcttcacctttttctactagttttttagcatagtctagataaagtccttttctttcactctgaacatatggtccaacagggccacctacatcaggaccttcatcatgttttaagcctgtcatttcaagtgttttgtaaataacagctagtgcatcttctacatatctttcctgatctgtatcttcaattcttaaaatgaatttaccatcttcatgtttggcaataaggtaggtatatagagctgttcttaagtttccgatatgcatataaccagtagggctaggtgcaaaacgtgttcttatttcatttgcagccattaaaatcactcctatgtaatattaaaagtattataaaatgcctcacacctaaaaattggtgaaggctaattaaaacggtattttaataatataatattagatattttatgtcaagttttatagagcaaccatgagtaatttttacgttgaaatttcaagtgtgcaatcgtgtaagaattatattataataataggatatgattttgtaaataataagacaaagtaagagaaaattagttaagctataacatatgtataggataagtcttactttgattttcttataatagggagaagtgtgaatggttaatttaattatattggtagaagatggatttgaggatatagaacttttgtatcctttatatagattaagagaggctggttatgatgtaaccttagttggtacaggaagtaaatataattatacaggaacacatggttatattgttgatgtggatgcatctgccgaggaaattgatgagaataattatgatggagttataattccaggaggttcagcatcttataagcttagaactaatgatgatgttaaaagaataataagacatatgaaagaaaaagacaaacttttagcagtaatatgtgatggaaattatgttcttatatctgctaaggttttaagtggacataaagttacctgtacggaagctataagtgatgatgttattaatgcaggtggagaatatgttagaataggaaattgtgttgacaaaaacataataacggcaaaaatgcaggttaatttaccacagtttatgagtgatatttttcagtatttaaataaataaaaagagaggtctacatgaaaaaattaatttataccgtaggatatggttctagaaaagatgaagagatttatatccttattaataaatatagtataaactgcgttgttgatataagaaataagtcagataatatagaaagtttaaaaaagcttctaaacaatcaaggtatatattacatacctatgcatgatgaatttaattttgagaaaaatgaagctcatgattttgaaactgcaagggtaagtgaaaatgtaaaaagtggaatgtcaagaatagaaaatggactagtaaaaggatttaatatagtaattatgggtgaagaactggatccaattagttgtaatagaggaattttgataagctatatattaaaaaacaaaggtattcatatagagcatataattgatgaagaaatagttagaagtcaagaagatttggagaaggaacttttaaaaggttatggagttaaactaataaagaaagtagctgaattatctataaaaggtattatgagaaataaagatttagaaatgaatgaagatgattttaaagctgaaatgatagaggaagcttacagaataagatacaaagaaatattaaataaaaaacatagggaaatatattaagatattttcctatgttttttattttaccaagaacttttatttcttcctttaaagaatttaactaaaccaaagactaatagtgcaataacagctaagaaggctacgactatgcctgagtataggaatttattatcagccatgatatttttagttgaaatcgaagggtaaagcttgtattgttttaaagtatctctttccttcaaagttaaattacctacagctgtatcagtgcttaaattccaaggattaatagaaatcttctctgttaattttttttctgaatcattaaaggaatttttataataagttacatcctccttaggtactaaaggaacctttatagttttgtagtaaccaaaatattttagaggcctgtacttaattatttcatatttatatactttatttttatgatataaaatagtaggttttatgctgtagctataattaataaggttattcatgtccttaaaaacttgaacatcatccttatcatattgagatttcattactacgcctattattttcttattatttctattaaatatagttattaaacatcttcctgcttcatttgtataaccggttttaccaccgatgcaggttttgtcataaactggttctttaggatctattattttatttgtgttttttaattctggttttgcaccatcattaagggttactgtggttttttgtgtagatattgtttttagtatccaatttattgaaaaagcagttttggctattctactcatgtcataagctgtagagtaatggtctggatcatgaagtccattgggagttacaaagtgagtatttttaagccctagctttttaacttcattattcataataatagaaaaatctttttttacctcatcagtaggagagttgattttatttataagatttgcagctataacatatgccatatcattggccgaatacattaaaagagattttaatacaacatcacttggtagcttctcgcctacatttaatggatgaatattcttatcaaacgaatattcaggctgttctttagcactctcggagtaataaagataatctgatggctttttattttcgtttaaaattatagatgttaataattttgttgtacttgcaggaaaagcttttgcatcttgatttttagcgtagataacttctccagttttggcatcaattgatatagcagaggttccagcaatatcaggttgattgactgccgctagtgcacttgaagaaatagataaggaaagtattccagataacaaaattgataaaagtttacgtttcaaaggtcatcgctccaataaattttattttatataggttttctatgtaaaagtacacttattttagaaattaataatagcatatagaacaaaaataaattatattagaaagcctatagtctactttacgagtataacattttaggagtctaagggcaatggattaagaaaaaataggtgcctattatataaagcgtaaagaatatgcatagcatgtcttaaatggataggctaattctataatagcatgaataaacctagtagattattcatgctatttatagagttaagcgtcagtagattttttattggatttgacaaagtataatgatgcggcaattaatactatataaataatcaagtaggtcacagataatgtacctgttcttgaaaataagagaaagtacagaaaaattacaaaggatacagcagtccaaaacattgaaatataggataatttgctgttacgttctctccatgaaataggatctttcatgtttcctaaaattttttcacgatttttatttcctggggatgttttggaaaccaaacttctataatagaatgaaagtaaagcacctattattgtaagggcaaagaaaaagtatttaagagatatggttgtaacattcataagcttcacctctaattaagataaaattatatttactgtatataaagtattcccataaataagatgaagtatgcaataaaaaatgttatagtatgtgaaataaagactttccccctgattttttatatcggggggaattattagtaattaatttttttttgtatgaactgttatgttgtgaaacttatcaaggaacctcattaagtcccagtatttatattcaacatatggttcttcatccgttcgaagatcacttttgatatcatttttttgtattatcttatcaatggttttgttgttatgtttaaacttaactatatagatgtcatcagaatcaacatctatttctagtattccaagatttatagatttttcttttaacttttttatggatataacttttgattttatcgttggtatcttacttaacttatatatcataaaatttcttgaagattttaatatcaaaaaaagtatgaagcctaatattaaaacccataagtacatctctattatatattgtttcgtgaagaaataagttatataactaaataccgtgaattttaaaataacgtaaagcaatataggtcctaaaataaaggaaataaaaaaagctaaagaagcatttagtaatttattcttcatatctgacatcatctccatgtaaacttgtaaaactatactttagtgaaataaacaatgaagtattttatatagattaattataccataaaaaatatgttaacgaataaagagttactataaattatgttaattatataaatagtaagtaaaaataatataaaatttttatagaggtagaattttcaaaaatgtgagaaaatactttatattttgtattctatagtttataataaaatatatattttattttggaggggtatatatgggaagttgtccatttttaactactacagaaaaggagatttcatgttttgaggaatgtattttttataaaaatgaaaatacaaaggaagaatgtccttttaaaagtgttgaaaaattaggtgatgatggaataacaaagatgtactatgattactttataaaaggcaataaatatttgtctaaagaagagtactccaaaggtacaatataaaaatgaataaaattacttaatattctgaatgctatgtttggaggggaaatagcatgagaagagtattattaatattaaaacccactattgtagagagaaagctaataggtaaggtactaagcttctacgaaggttctggatttcgtatagaggatttaaaaattacaaaattatatgaattagagaatgttataaatgatgatgttatgaagaaagtgggtatgaattttggtttagagaatagagtagttatagttgtacttttgtatgacaattttaatctgaactttgaagaattgaaaagtgaattaaagatttatcttaacactataaatggaaatagtgaaggtaatgaaatatatatgtcttataatgaagatgtaaatgaagtaatagaggttttgtttcctaaagtcagtaagtttgcctttaagggaagtaaggctactagtgtttaattatatagctaataatgtttaattagatgcctataagttataaggcatctttctttatatagatatgtatatattacacaaacaattgtattttgttctaaaacatgttaagataattataatattagaggaaacctatgtcagtgtatattttgctttttatcaaattttaggagggctatagatggataaaattaagataggaattttggggcttggtaatgtaggcagaggagttttaaaaatactcaatacaaataaagaagaaatacaaaaaaggtcggggtatgatatagaaattggaaaaattcttgtaagaaatatagataagaataggggaatagatgtacctcgtgaattgcttacagtagaccctgatgacatacttgaagatgagtctataaaaatagttattgaggtaataggtggaataaatccagctaaggactatatattaagagctatgaaaaacaaaaagcatgttgtaactgcaaataaaatgcttcttgcaacagaaggcgatgagttatttgatactgctgaagaagagggagttatgttttattatgaagcaagtgttgctggaggaattccaataatacatgccataaatgaaagtcttactgccaataaaattgaacaattaataggaataataaatggaactacaaattatattttaactaaaatgactcttgaaaaaatgaattttcatgatgcactaagagaagcacaggagaaaggatttgcagaggctgacccaacttctgatatagaggcttatgatgctatgtataagcttgctatattaagctcactttcatttggtactaagataaatgtagatgatgtatatagagaaggaataacaaaaatagaacctatagatatagaatttgcgagagagtttggatatgtaataaaattagtagctattgtaaaagaaactgagacgggacttgagatgagggttcatcctactatgataccagaaaggcatcctcttgcaaatgttaatgattcgtttaatgcaatatttataaaaggaaatgctgttggggatataatgctttacggaagaggagcaggtgatttgccaactggaagcgcagttgttgcagatgtaatatctatacttagaggaaatgttgatttatcagctataagcacagtcaaaaagaactactggaatagagaaattaatcctatggacaaaacaagaagtgagtactatgtgagaataacagtcaaggatttgccgggtgttcttggagaaatttcaatgatctttggagaagagggggtaagtcttctttctgttatgcaaaagggaaagagagaagagtgtgttactgtagtgtactttacccattcggccaatgaaggaatgataaagagtgctatagatagaattaaaagttctaagtatacaaagagcgtggataatatcataagaatagaaaatatacaataaatattggaggaaaactgatgaatcacatatattataaaagtaccagaaataatgatgttagtattttagcgtctagagctattttaaagggtatatctgatgatggtggcttgtatgtaccagagagagtaccagagcttgattttgatattaaagatattgttaatatggattataaagaaatagcttataaagttatgaagactttttttaccgattttactgaagaggagctcaagtactgcattgaaaatgcctatgacagcaaatttgatacagaagaaatagctcctataaaaaaggcaggagatacatattttttagaattatatcatggtcctaccttagcatttaaggatatggcactttcaattttaccatatcttttaaaaactgcttcaaagaaaaatggaattcaggataaaatagttattttaacagcaacatctggcgataccggaaaagcagcattagaaggttttaaggatgttgaaggtaccgagataatagtgtttttcccgaatgatggagtgagtgaagttcaaagacttcaaatggtaacacagaaaggaaaaaatacacatgttgtggctataagaggaaactttgatgatgctcaaagcggagttaaaaaaatatttacggacaaagaatttatacaggagcttaaagagaataattgtgtattttcatctgcaaactcaattaacataggaagattagttcctcagatagtatattatttttatgcttattctaagatgtgctcaaaaggtgaaattaattttggagaaaagataaattttgttgttcctacaggcaattttggaaatatactagcagcatattttgctaagagtatgggagtgcctattaataagctaatatgtgcttcaaatgacaataaagttctttatgatttctttgaaaatggaacttatgatagaaatagagagtttgtaactacaatatcaccttccatggatattttaatttcaagtaaccttgaaagacttatttatcttgtatgcgatagagattcaagcaaggtggctgattttatgagagagcttagtgaaggcggaaaatataatataacagagaatatgaagaaaaaacttaaggatttttatgctggatatgctacagaggaagaaactaaaaaggctatagaaaaaatgtataaagaaaataaatatcttatagacactcatacggctgtagcttatagtgtgtatgaaaaatatttaaagaatacgaaggataaagcaaaaactgttatagcgtcaactgcaagtccatacaaatttacaaatgcagttatgacctctcttgataataaatatgcttcttacgacgattttgaactcatgaagaagatgagtgaggttataaataaggatataccaagtggtgttaaaggacttaatgaaagaaaagttattcataaagatatttgtagtaaagatgaaatgaaaaaaatagttagaagttttttaggtaagtagctataggggcttggagaatatatccaggccctttagatggtattaggaggacattaatatggaaagagaacatgatacagtaaagaaaatgtggacagattatttaggatttatagaagaagatatagagaatactgaaaaaacgtattcttcatggtattttggaggagataaaaatagtgcaaataatttagctgatcttgtaatgaagggaactaaaagagggactacaagtctatactacttttatgaattggaaaatgatccattacctaaaaagggtgattttagtataattacggattatagtggtacagcacagtgtgtaattgaaactactaaggtaacagtgctgccatttaaggaagtaacagaggagcttgcgtttatagagggagagggagacaaatctttagattactggaaaagagcccatataagcttttttacaaaagaattagaagaagaaggaaagaaattttcagaggatatgctagtagtatttgaagaatttaaagtggtttataaataaatttaagatataggtttgataaaaagcatacataaaaattgtatgctttttataattttatttattatattcttcaagtgccttttttagtataactatagaattctctatgtcctctatacttgtacaatatgaaaatcttgcttcgctttttccaaggcccaaagttgcataaaaacctgaagcaggagcgaacatgacagtttcgttgttataagaaaagtctgtaagaagccattttgcaaaggcatctgaatcatctactggaagctttgctaatatataaaatgctccttcaggtttactgcagataactccaggaatactactaagacctgaatacattatatctcgtcttttcttataggccatttttacatctgttatatagcttcccattgtatttattaaatttgcagcagcatattgttcaatagttgaaacacaaagtcttgcctgacataacttaagtatttggtgcattaagtccttatttttagaagcaactaaaccaattctagcaccgcaggcactataatgttttgatatactgtcaacgagaataactctatcaagtatatcagttaaatgtatacttgaagtatatggaacgttatcgaatatgaactgtctgtaaacttcatcagatatgatgaataagttatactcctttgctatttctccaagcattcgcatctcctcataggaatagactgtcccagttggattgcaaggatttgaaagcataatacatttagttttatcagttattttagctatgatttcttccttttttggaagatggaagttatcttctatctttgtttcaaagggaacaatttttgcacccgaaacttttgcaaaactattgtagttagagtaaaatggctcaggacttaatatctcatcaccaggatcacaggttgccattattgcgaattgtatggcctcacttccaccgtgagtaatcattatttcatccttttcgaaatatatgtttgaatcagacaaagatcttataaaactatctattaaagtatctattccttgagaatcagaatatttaactattttttcgttataatttgtaatgccctgaaagaaagtatcaggagtttttacatctggctgacctatatttaaatggtatacttttatacctctatcttcagcagcctttgaaagtggaactaactttcttattggtgaaaaatccatattgtgaactctatttgagaaattcaatttaacatcctcctattagctattaaatgcattagaatatttttcaagtaaattgtgctttagatcccaaagcttttttgaaagatcaacataataagtatgtggattttcaagtcttaaaacttcagcccaaagcttttctgtttctttttttgctatatttcttatttctaaaacttcaggattttcatatacgagttctccttttttaaataattgaactcttaaatctttaacatagtaatgcgttaatttctttttcttccaagtgtaaataggatcaaatatttcaagaggtttagtttcatcaattacctcatcatttaaagtaatcaaatccgctaaagccttgtctgtttccttatcgaacaatctgtagatttttttgaagcctgggtttgttatcttttcctggttttcacttattttgattttaggaacgatatttccttcgtcattttctacagcacaaagcttaaatactcctccaaaaacaggttctgattttgcagttataagtctttcgcctactccgaaactgtcaacttcagcgccttgaagaagaacatctgttattatatgttcatctaatgaattggaaattacaattttacaatcgctgtatccagcttcatcaaggatttttctgcatttttttgtaagataagttatatcaccgctgtctattcttattccgctaggtcttataccttttggttttaaaacttcatcaaaaacttttatagcgttaggaagacctgattttaaaacgttataagtatctactaaaagtacgcaattttcaggatatacatcagcccaagctttaaaagcttcaaattcattatcaaataattgaacccaactgtgagccatggtaccaacagcattaactccaaacatttgctcagatatagtgcaagcagttgagctgcaaccgcctataacagctgctcttgcaccataaatagctccgtcatagccttgagcacgtctagaaccaaactccataacaggtctgtttccagcagctctgcatatcctgtttgcttttgtggctattaaagtttggtgatttattgttaatagtatcatagtttcaacaaattgagcttgaattgcagggccttttacagttacaagaggttcatttggaaatacaggattaccctctggtactgcccatacatcgcattcaaatttaaagtctttaagatatgaaaggaattcttcagaaaattcgtgtttacttcttagataatctatatcttcctttgtaaatcttaaattagaaaggtactctgttagttgttgcacaccagccattatgcagtagccaccgttgtcaggaacccttctaaaaaacatatcaaaataggctgttttatttcccacatttttatttaagtatccatttcccatagtaagttcgtagaaatccactagcattgtcagatttctgtcatccttaatatcaaaattctttttgaattccataaaaatttcccctatcatttaagtggtatagttatgcatttgttttcctgtagggtttccatagttaaatataaacaaaagccctactaatgtatttatatattataacttattctaataccatatcaaaattattacaatatattttcgcaatgtagtggcataccaccttaaaagtatttttacaacatagtggtacatacatttatataacttatgtagaaatcttcgtaagctgtgctttaaagcgaagataaaattaattgggttaggtatttgaaattatagtggtttaaaattttttaatatgataagaattaaaaatgtgatgattatataattttttagtttgactacttactagaagaaatataaaatgtataagttaaacaaaaataaaatatttgaaagtataagtttaaactaggtgggtaaggtatgatttcagaagctgtaaaaagagaattttgtttattgagagataaaataatagaacaaagctataaacatcttgataacatgcagagaaatgcagtttttaatggtggaagtaactgcattgtcgtagcatgtccaggagcaggaaaaactcaagttattcttaatagagtagattatctatgtaaatttggaccagtatataatactgagtatgttcctgattctctaaaacaagaggatttagaatatatgagggattacttaaataatttttcaattaagaagacaagcataataaccaatagaattaggcatcttatgagcttgaaaaaagtctccactgacaatatcatagtaataacttttacaaaggctgcagcggtaaatatgaagcgaagatatataaactattttaatagtagaaaaacgcctttttttggaacctttcatagtttgttctataagatactatcaaggcataaaggaaatataaaaatcatagaggaaattcaaaaatacaatatagttaaatcagttcttatgaagtacatggatgaagtaaatgatgataagctaagagaggtaataaacgatatatcaagtcttaagtgcagcgagtgcagcatggaagactttaagtctcaagtagataagaaaatttttgaggaatgctatgaaagatacgaaagctataagaaggataattcacttatggattttgatgatcttcaaatagagtgtatgaaaatgtttgaggaaagacctgaactccttcgcggctacagtaatctatttatgtatgttttagttgatgaatttcaagattccgattctcttcaaataaagcttttaaagatgctaagtgaaaaaagcagtatatatgcagtaggagatgaagatcaatgtatatattcttttagaggttcaaggccagattgcatggtggattttgataagatatttaaggatggaagaaagctatttctaagtacaaactatagaagtgttaggaatatagttgacatttccaagaatttaatagcaaataatgagaagagaaatttaaaggacatagatgcaaataaatcagacagtggaaagataactataattaacagcaaaaatgagaatatagaagcagataaaataacaatagaaattgaaaaattaaaaaacatatcagactataattattctgatattgcgatactgtatagaactaatgttgaaagtaggagtctaattgacagtttcataagaagaaatattccttttaagtttttggatagggagtataatttttttgaacattttatatgtaaagatatagctgcgtatttaaggcttagtattgatgaatttaatcgcgaaagttttttgcggataataaatagaccatttaggtatataagtaaggttaatcttcaaaaagtaaaaagttatggcaatatggaaagtgtctttgatatattaaaaaatatagaggatcttcctatattccaaattaaagacattgaaaaacttcaaactaagataagaaatttaaataaaatgtcccttttaagtgctgtgcagtttataatttcagatttaggctatagtgattatattcaagattactgtaaaaaaagaggctttgatgtggaagaaatgatggatataattgaagaatttaaaagtgcttgtgatggatataataatataattaaatttctttcacatatagaagaggttagggagaaaataaaagaaaataaagtagatacaagtaaggacacggttcttttaagtacaattcacggagtaaaaggcatggaatttaaaaatgtatttataataaactgtgatgaggaaaatataccacataagaacagtattgatgagaatatagaagaggaaagaagacttttttatgttggaataacgcgtgcaatagaaaatttgtggatttctataacgagtgagcttaaaggctgcgttagaaagccttcaagatttataaaggaatgtaaacttaatttgaatgattttgaaggaaaatataaaaaaggtgataaggtagagcacgtttcttttggcttaggtgaaattataagtattgaagatgaggttacggaaataaggtttaagaatgacactagaagatttgataccagtgtacttttgaatgcaaaattaatgcgaagatgccagtgaaaaattatatattggaaaccatactgcaagtatatattattgaattacaaagaaaaagtaggataaaacaaaatattattagtaaaaaagttgtgcaagcaatgaagagaaaacttttggcttgcacatttttattttgcctcataaaaatttaatatagaatttaataatattaatcaatagaaataccaaggaatatagatgatgtcttaaaatagggtaaagaagtaacagaagaaatatataaactttctattcaattaaatggagccaaaacagcattaataaatgcagataagaatagttcgaatacaatgaaagtgtcttatggaattttatatagaggaaatagtacaagtgatttaagaaaaactaatgaaaaaagtgctaaaataaaagatagtaaagaaggcttatttgatgaatggaaacataaggcagaaggcttcttaaactttgcttcaaaggaaagtaaaaaaattatacatgagactcaaggagagttaggggaagcgtttaaggaaacagagaactttgtttctaaggcaattgatagactaaataaaagcttagctgattttaagtacataggaggaagtgtagtaacacatccattgttatttatgtatggcttgtcaggtgctgtagtggataattctgcgggaaacaaagccttagaggagacaataaaacataattacgaatataagtatgaaactgacaaggattataaagcattaacagctataaaggcaggagaaactgctggggatgcaggaagtatggtagtaggtggagctcttatgggtggtggtggagcagtagatggtgcaggttatgtgcttgcagttccaacacttggaacagttactgtaccagcagaagcgataggtaccgcagctatggtagcaggaggatacatatttgctaattcatctggtaaatttggaagtgatgctcaaagtgtttttaattatgctcatataggagaagattcggaccaagtagtatcaagaatagctgataatcctgcgctaactaagaaagctgaaaaaatgggatcaaatgaaagaattcaacaggaatcagatcatctgattcaggaattagcacaaggaaacaaaaatcccggattagggagtaaaaatttatttaaagatgtttcgtatttaagaggcagaaatggtgcaagaattttttatagaattgttgatggtaagatagagatactagctaaggcaagtaaggcaaatgagcaaaaggtaattagtatacttacaaagatgtataacaaataaaaatataaataataggagaggtaatatgatagttaagaaaattagttttgcaacaccattagaaacattaaaagatattaaagatgataatattgatgtttttgtggagttagaagatggctacagttatacaatagttgtagcaactgaacaaaatttaataactcagatgaacaattcaaaaaaagattttattgaagctggatgtccatttgttatagtgaaagaattgagaaaaaatattataaaggatgctgttcaatcatatgctgagggtaatgcatattggcttaaattaaatcacctgtctgctgaatttgatataagtgtattggataaaatgatagaaaaaatgaataaagacaatgattagaagtaaatattcaggtataaatggaaaaacaaaattttttatattttttctgaaagattgaatagagtggaggctatgaaatactacataatatataatttttaactttatcaattaatttgggttgaataagtggatatgtccattttgtaggcaggttttcaaataaacatactttttctatttctgattttggtagttttccaaatgttttaatatctgaataatataacattccatagctttcttgaccactattattaactctagtttttccaataactgagtatacacaaattggttttatcgcatactcgcatgctcctgtttcttcaaataattctctttttgcagtatcaagaattagttcattttcttccctacggccacctggaacttcatatgtactacgttctctatgtttacaaaaaacccacttgccattgtgcctcgcaacaataacagcaaattttagcagactatcctcaacacctttataaaattttacttccatattgttaacctccaattattttgctatattttactattctttattagattatagcttttaatagcacttattacaacataatttacaaagtatcacatctactagtgtggaagcagagatacgtgttggggaggttgatgttttcgaaacactaaagacaccatatggtaaatttaaagtttacgaaagacaaaatggcagatacgttggatatacaaatcttctgtttaaagatgaatatagatgtgcatttgatttttagacatagcaattaaaatttgtatattggtaaaattattaaaaggcatggaattaaaaaatgtatttataataataattaaaagtttagatattcttctcatagcaatagaaaggaaggtctctcactggaagataaaattggccaactttcttataatcaagattagaatatagcttaagtgctttattatttccactataagcgtctaatctaatgctggaatagttatttttagtagctaaatcttcaatgaactttaatattttttttgcaatacctcttccttgaaattcgggctgaacacataacctatgaataactaatatctttttttcatgagtaagccagtctatttgactgtattcaggcggttgctgttcatttattgcaacgtaggctacacatctttcattatcctttaaaacgtagcagtccttacgtttaatatcattttcaataatatctgaagaaggataaaattcatcccattggtatatgccttgacttttcatatatcttatacagttagagattatatcaattacgcctgataggtcttctgtctgtcctttaataatattcatctttcttttctccttgacaataatttaatatatttgaacttctttaattaagtaataagcttgagttaatacatcttttagtataacaataatttcaatatatgtatataattaaacaaatgttgattctctttccctaaaattcgatgtttggtgtaggaatggactgcatctcttggacagaagttatatatttaaaatgtaagactttgagatgaacattaaaatatatttagcaccacatattgttaaattgaatattataataaaagaatcaataaaaacttcaggagattagtaaatgaatggttatagagaccacagtataagaactagccaattttactgcccatattttaatgataagtatatttactcacaaggtggatataggcagaaggtagaggaatatccagctcaatatcaaagccacccacaaagcccgccgccagattatatacctagatttccaacaactacttataatgctattgcctctagcagtatatctccgtgcaataataaatacacatatttgtggctaaaaaatggagaagctttttggtcttatattgcgtatgtaggtactagatcaatttctggatggagatatgataggggaagatgggtacaattcggtttaaatctagtacagattagaaattttacttgtatataagaaaagaaacttccatattagatataaaatatggaggtttcttttctcaataagattttatacaggtcgagcaccatttaagagctgttctgtgcttagtccaaaggtgtactgaaaatgaggagcatccacaagggttattgcataactagtccagttaccaccccattccaagcctacctgttgtccaagtcgtcccatttcattaaaggaagttatatcattccaagaaacttggccgttctcaacaggtgcacagtcaaaggccaaaccccagttgtgataggaatcccctccttgagcatcagtaactatattaccaggcatagttctaccctgagtatataattgatcctgctcataccaacttctaaaggcttgaattaccctaacatttaatccattagcagtacataaattaagaaaacgttgggctaataaggctacgtatggatttaaagaacttaagcttatggagctaggtctattactgtaattaataacaggattaggattaaataattgctgccgtgttcttggatctacaacaccatttttaactagtccattaacactttggaatctagtaacagcgtcaatagttactggtccaaatattccatttggagttccaactgtaaaatatacagaattgagtttgttttgtatggaagtaacctgacttagtaggacactccaagtaattggtcctacaatgccatctggaaccagtttatgttcaacttgaaaatctcttactacttcgtaagttagtgagtcaaacacaccagtaaccttaaggccattgtacctataatttaaaccatataagttcatttgaagtatcctaacagaaggaccctcgtaatacaagcgtagagtaggaaatgtaggcattatacttctcctttgaaatatatatacatatctatattatgttgatgtctagtgtttggtgaattatttaagaaagaattaaaaagatggagagaacttaaagtattctctccattctttattaaaagtttattgtacgtgtatttacttgttgaggtccatcacttctgtacttaacgccttgaacaactacaccatcactgtatacagttacgtgatatccttcagggtcattgtcagtatttccaagagaaggaacaccaaagatactagcagaagaactgcctagggaacagaaattatcgctgtcaccatagtatgcattactaaattctctgtgagtatgtcctgtaaacattataacttcaggatgcccgtttaatgcatattgctctaaagtgtcagtatttaaaagagttccccaacctgaaaaatttggattggtaggatctgatccatatacagtgtactgtagaggttgatgtaagaaaacaaacataggttttttgcctcttgaattactccattcatttctatttgttctaatagtgctacttaaccagtctatttggctaggattaagataagcgtcacatggattagaaggtatttcgtcagtgcctaaaaaagcgagtctatcgtttttattatttatgtattgtaaatcgtatgagttattacgagcagaatctgttacacctggtctggaacctataagtgagcggattctatttgtgttgtaattgaaattattaagacaagtttgataatttcctgtgctagtgcctccaaaagaatattcatgattaccaatgttaaaatacatgtatggaattttatatccgttgttagataaatcgcccttaatttgagatatattattgtacaattgatcataagtatcctggtaagctgtatcaacattatcgccattaaatactacgcattggtcatttgagttatattttgctatacactctaaggttgttttgagatttttagtggcatgccatccaccttgatcgtctgaacctatgtgagtatcggaaataacatcaaattcatattgtgcactagctttaattgctgttgcagagtatataccaaaggtagcaactgctgcaattaaaagtgataggaatgtttttctctttttcataaaattacccccaattaaataatgtgtttatttttatattttaatgtaattgtacattgaaattataaaaatgtcaaataatgaaatatatttaaataaaatacataaaaattgtacagaaataaattatgattattttatgctttgataactaaagatatctgtgttgaatagattaaaaaaagagaggaaagcaaagtgataaaatttctaatgaggacaaataaaaaggttagaaagttaaaaaaaaagacaggattaaaaaggaaactggaaattctatatcttgcttatagaagaaaagatgtgccatggtacgctaaacttatcgcaatagttgttgtaggatatgttttaagtcctattgatttaattccagacttcataccttttataggatatttagatgatttaattatagttcctataggaatatctttggctattagattaatacctaaagaagttttttatgaatgcagtaaagaagcagaagaggtttttaaagaaggaaaacccaaaagttggttttttggtgttcttataataattttttggattgtagttgctgcatatttcttaaatttatttttgaagagtctgtatagacattaaaagcatcagtggatttttaatttgtcagctgcttttaatggtatatatgatagtgtaaaactattgtagaatagcattttactataagatgcaggtgttaagagctatataatttctgtgaatgtcactaaatactgcaattttagagagtatctatacaatatcaaaataaaagaggaactaagcagctttgttatggtgtggtttagctatttttccaaaaacccaaaacctataccctaagaaattaactacttgagcaagtaccattgagattatttttgcaaaaaatgagttaaaatgactattatttattagcaggctaagacctactaagcttacaccaagagaagctgcgttaactacaataaattgaataatttcacttattgtttttttctttgttcttgtatctgtaaatgtccaaaatttattaaataaatagctgtttaaggttccacttgagtaagatattatttgacttattatatagtttatgccaagtaagctattgaatatagaaaacattccgaaatctactaaggtatttaaacatccaacacaaacaaattttattagatgtttgaattttttattatccataaaagtactgtagatattttttacaatatccatggtaaccactccttttattatcttattttgtttattaataataacaattaaatacggaataattaccatataaatgtgttaaaagtgtgtgattttaaaacaagataaaaattaccacatgataatatgttacatatgaccttaaattgcaaaaaataatttgtgatgataatatatacttacgcaagaaaactatagtattaatgtataatgaattaatttaaattataaatgcaccacaaaatttatgtgaggcatataatgattatgaataaatactaaattttaaattagttttaatgtataatgtatgaaaaaagcaaaatagagcataaacataaatatatattgaatatttaaaaaataaacgcttcctagaaactttattgaataattttggtcattattatataattttaataaagtagtgtggaagataagttaaaactgtcatgttatggttggttttttttcaatttagaagaaaaaccttatattttacttttatttgtcatttgagaatttaaaaaatttaaataaagggtaggattgacgttaatgaatattaatatagaggatttaatattttcacttgatataggaacaagaacggttataggaactgtaggctcaataaaggataaaaagtttagcgtaatagctgaaaagcatacagagcacgaggaaagggctatggtagatggtcaaattcatgacataaacctagttgctagagcagtaaataaggttaaaagccagattgaggaagagctagggtttgaacttaaggatgtagctatagctgcagcaggtagattcctaagaactacagctgtaagatctgaattaaacatagatgaagataaagaaattgataaggatgtaataagaggacttgaattaactgcagtaaagaaagctcaagatgaggtgaataaggagactgaaggcaaactatactgtgtcggctacagtgtaaagaattattttttaaatggatatgcaatttcaaacttgctttctcataagggaaattccatagcagttgatgtaatagctacatttttgccaaggtcaatagtagaaagtctatatgctgttatgaataaggttaatttaaatgtaaaaagcctaacgcttgaaccaatagcagcaatggaagcagcggtacctaaaaaccttaggcttcttaatatagcacttcttgatgtaggagcaggaacttctgatatagccataagttcaaaggatacgataagcgcttatggaatggttccgtttgcaggtgatgaaataacagaggtaatagcacaaaattatttggttgacttcaatacggcagagaatataaagagaagctgcaacgtggatactgaaatcaagtatactgatgttcttggaattgaaaatactataaaaagtgaagaagttataaaattaatacagcctactgttcagaaattagcagaggaagtagcaaataaaataatagaattaaatggagaaaagtctcctaatgcagtatttatagtaggagggggagctcatactcctatgcttaaggatcttttagcagaaaatttaaaaatccaacctcagcgattggcaattaaggggagagaatctgtgactgattgtatctgcacagataactcacttggaagtacaggagttacagttctaggaatagcacttgtcgcaataagaaggtttggaaatgactttatagatgtaattttaaatgataatataataagtttatttaatgcacgtgttcacacagtaaaagatgtagtggttcaggcgggagtaaatcctaagcttttaataggtaaaaatggaaagaatgtaaggttcattcttaatggcgttaaaagagtagcatttggaactgttgctaagaatgcagaaataaggataaatggtttaatagcaaatatagattcagaagtgaaagaaaatgataaaatagaaataaagtatgcagagaatggtatagatgcttctcctattataaaggactatgtgaaaaatttatacagtttaggtttttttatcgatgatgaagttgtgaatttagaacctatattcataataaatggaaacaaggtaacaatagacacagaaatttctgaaggagatgaggtggaaactgtatatccttctaaattaatacactatataagatattatgatagtgacttaaataaagagtactatattaacaatataaagcttgatgaaaactatgacataaaagaaggagatagaatatacacaaagcctaaggaagaggaacaagaagttgagattattcctttggctgaagaagataaagaagagcaagaagtagtgtctcatcctaaggaaatagaaaaagaagatgatgatgtaaataccatagttgtagttgtaaatggcaatccaataaaaatgtcaggaaaagaaaagtataaattcgttgatatatttgattactttaaatttgatttaacacaggtgaagggaaatcttgtacttactttaaatggtgaaaaagtgagcttctttgatgaacttcatgataaggatattatagaagtaaaatgggaataggaggaaaagttaaaatgaattatattgaagaagcaaaagtaatgtatgatgaattggtagctataagaagagattttcatgaacatcctgagcttggctttgaacttgaaagaaccagtagcaaggtaaaagagtttttaaaaaatgagggaatagaatactatgaaactgcaaaaactggtatatgtgctattataagaggaaaaaacacaggaaaaacagttggcttaagaggagatatggatgcccttcctcttatggagaacaatgaaaatagaagctattgttctaaggtaaatggtagaatgcatgcttgtggacatgatgcgcatacaactattttgatgggagctgcaaagctgttaaacaaaatgaaagatgaacttcaaggaaatgtgaaacttttttttgaaccagcagaagaaactacaggtggagcacaaattatgatagaagagggtgtgcttgaaaatccacatgttgatgcagttataggacttcatgtttcagaggatatagaatgtggaaagataggtataaagaagggagttgtaaatgcggcttcaaacccatttacaataactataaaaggaagaggagcacatggagcacatccaaatgcaggagtagatcctattgtcgctgcgtgtaatatagtaaatatgcttcaaactctagttagtagagaaatttcacctgtaaatccagcggttttaactataggatacattcatggaggtactacagcacaaaatgtaataccagaagatgctaaaataggtggaataataagaacaatgaaaaaagaagatagggagtttgctaaaaagagattgaaggaaatggtagaaggtgcagccactgctatgagaacatcagcatcaattgatatagaagaaagctatccttgtctttataatgatgataatatgtttgaaatgtttaaaagtctagcaaagaatcttttgaaagaggaaaatgtaatagctcttgatgaacctagtatgggagttgaaagctttgcgtatttttccatggaaagaccatcagtattttattatttaggagctagaaatgaagagaaaggaatagtaaatccagcacatggaagtctctttgatgtggatgaagactgccttcctataggagtagcacttcaatgcaaggcggcagtagagacactagaaagattgataaataaataaaagttcataggaggaaacaatgaaaatagttataggaccaaacgaagcgggacaaagagtagataaatttataagaaagtggcttaaggacgttcctttaagtgcaatttacaaggcatttagaaaaggtgatgttataattaatggtgcaaaatgcaaaaaagaaaagtatagccttgaagaaggggacgttcttgagataaaatatataaggtctgatgctaagaaaaagaaatttactagaattgaaaataattttaaggttacttatgaagatgaaaatatgcttcttgtagaaaagtggccaggagttttagttcattcagataaagaaaaaacttcaccaacccttacagattatgttttatcctatttatatgataaaggggactatgctccagaaaatgaggttacatttacaccatcaccatgtaataggttggatagaaatacctccggaatagtcatatatggaaaaaactttgaagcgttaaagtgtttgaacgaaatgataagggaaagaagaataaagaagtactactatgctcttgtaaagggaaaaataaaagatggaatttatgaagcttatataaaaaaggatgtatcttctaataagtcagaaataattaatacaccggcgcctggtgcaaaacaaatatctatggagattaagtgtgttgaaacttgtggaacattttcatttattgaaatagaacttttaacaggtagaagccatcaattgagagcgcatttaagtcatttaggcaatcctattttgggagatcctaagtatggaattaaagatataaatagttattttgaaaacaagtttggacttaattatcaattcctatatgcttataagcttatatttaaagattgtcctgagaagttgagttatatggaaaataagactattgcagaatcacttccgccaatatttaaaaaggtgaagagagatgtatttaaattttaaggagtaagtcttatgaagaaacaatctacagttaaaggatttgcagtactttctattggaacaatgataagtaaggttttgtcactagtatacgttcctcttttaacaaggatacttggaggagcggaaccaattggaatatacaatgtttcttaccaaatatatgtttttgtgtatgttctaacgaatgcaggtatacctacagctatttctaagttggtttctgagtttgtagcaacaaaaaactataaggattcagttaagagttttagaatgtgcagagcaattttgatatttttaggaattgtgatgtccgtgattatgttttttgcctcaggaattattgcaagctttatgaactttccacaggctaaattggcagttatggccttaagccctgcaattctatttacttctgtatcatctacatataggggatattttcagggaaatggaaatatgactcctacagctgtttcacaggttttagaacaattttttaatatagtattttctttggtatttgcagcttttctacttaaaaatggtattgcacaggcttgtgcaggagctactgttggaactaccttaggagcttttgtctcagcattatacctaatgataacctatgaaatagctagaaagagagaaacacatattaagaatccagagggagttaagaggaaatcaaatagaaaaatacttaataaaattgtaaattatgctcttccaataaccatttgtattggaatgcagaatttaggtacattatttgatacttcaaatactaaatctagacttttagcagcaggatttttagaacataaagctacagcgcttgttggaaatttagcacaatatcaaccgctaataaatgttccaataacagtacttacgcagcttgcagttgttattcttcctgctatatcagcagcagtagcagttaaagacaaaaagactatggtaggaaaaataaattttgcttttagattatgttttataatagcaataccatcagctgttgggctttctgctttaagtaatcctatatataaagctatttatccaagttcagtatcaggatatagaattatgcttatgggagcagaagtattagtatttatgtgtttacttcagatccagacaagtatacttcaaggtgttggtaaattatatttagtaacattatattcgcttataggtgtggcagtaaaaatactaacaaactatgtgttagttgctattccggggataaatatatatggaactataattggaagtattgtaggatttagtacaaccataatattgaattatttattgatgaagaggtcaatgagagtgaaatttcatatgtttagatttatgagaaagcctattatagcttctattctcatgggaggagcttcttatggagtgtactatgcctttaattttgttctactttatgttaccaaaatacaatatatagctaatttaataggattgatttttgccatgatagctgcagttgttgtttatggagtagtgttagtgtttgtgggtggaatacgtaaaagtgatatggaacttatgccaggagtgttaagaaggcgtatacctagcaaaatagtagctatgatgagaagataaattaaaataaacttatacatgataaggtgtataagtttattttaatttatctttaatttttgtaattgcgaaggtgaataaaacaaaaccaagtataataataaacagagttttaggaagtataaatctatttggcacaatgttatttaatatggataatatcaggtacactaaaatgcaaagtagagtatctataaacatgtctacaaaggaaaagcgtatgtaacaaacttttctaatttctttcatgtttaatatataggcagttaaacatgtcacaaataaagttatagcatatccgtaaatatttataaatcgtattcctgttaaaacataaaggagaatgagttgttcaatggaaactataagagagttaataagaagcttattttgctttccaagaccacttaatattgaaaatgtagcaaaagaggtataatcaacaggaacagatagagcagaagctgctatgtaattacctaaatcatttctgctaaaaaacaactttcccagaagatttggaatactcaaagctattatcatagtaattgttcctaaaaaaaatgaaatttttagaacttgggtaactcttttttcaatactgtaataatctcttttgtttagattttgagaaatttcagggattaaaactgtggacattgccacaataattacaacaggaaaggaagttacaattaaggccatccctgaaaattttccgattaatgaaagagcttcactgtgtaaaaaaccagcatgtacaagccttacaggaagtataagagttgaggcagcagcaagtagtgaagatacaaaactatttatacataaagggattgaaactgaaaatacatcaaaaataagctgacctgagctttctctatcagaataaacagggcgaagatttcttctgtaaattaaaaaagctatatataaggctattaaacttataaattctcctaaacttaaaacaccataaacagcagtaacagttttagaaatgctttttagcatgaatatgttaattattgcaattactatgccaactcttgatgctttttctaatatatctatgtacgcaggtaccttggctttagatatgccatagaaatatcctttaagaatagcagatattgtaacaaaaattaaggctggacaaattaactcaagggagtatagggaacgcatgtccttaataaaagaattagaaataaaccttgagttgaagaataaaattacagctactaaggaagaccaaataaagcaaaataaggagctaattttaataagtgaatttacattagagtaatcattttttccagataatatagcaacttttcttgatacagctatgttaagtccaccgcaaacaaggcagcaaaagagatcatatacaggcataataagttgataaagaccaacaccttcagcgccaagtttttcagataatataactgaaaatataaactttaagattccagtagcaaagtttgacattgtcagcagtattgtatccctataaaaacgttctagtttcataaacactctccttaaaattactatcacaaataatatttatgtatacttatattaaatatatgccactatgtgaaaatcaaatatgaatatagtttaatattgttaatatatttagaattgagaggattttattttaggaggataaagtgaaaaaaattttaaaatgtatcatatttattgtttttgtatttgcagcaattagcatcatatataaatatatacataatggatatactgttaaatgtaaagataataatgtgaagtatcttataaaatttaaaggtgttagtaatgctgttgattttactgaagatgagaataaaaatttctatgtggcttataagagtggtatacaagcaatatatagaaatggaaaaaccgagaacatattaaagagtaatgatgaaaatataaggtgtatggtgtattataatagtaagctgtatttttcatccaatcatgatataagttattatgatttgaaaactaaaaagcttgtgaaaatagtaaatgacatacctaactttggtgattatagagatatttttataaatataagaaatggatatctatatgcctccatcggttcatcaacaaataatggagttgtgggaaaggataataagtggattaaagaaaatccatatacttttgatgttactcctaaaaacataaccttaaaaggaattaattttggagacgaaatgacaggggcatttgttccgtacaatacacccaatatcaaaggtcaaataattccagggcattttccgggaaatggttcaattattatttataatattaatacaaaagcagctgaaacctttgcctggggaataagaaatgttagtgggatggattttgataaaagtggaaagctaatagcagcggtaggaggtatggaagatagaggagtaagacccgttaaaggagataatgattatatatatgaaatagataaagataaatggtatggttggccggattacagcggaggtgatcctgtagattctccaaaatttaaaaatagaaataaaagactgcttgataaggttccaaacataaaccctccagccccactttatgaatatgataaggtaggaagccttggagttcttacagtggataaaaattcagttttagggataaaaaattgtatttttgtgtatgataaaaatgataattccataataaaaattagcggaagtgtaaaagatgaatttgtacactttactaataaatcgtttgtcaatgcaatgcacatttttgatgatggaatgtatattttagattcaaaggaggggtgtttgctacaagtatataagggcgcttcaaatgaaaatattctagtcgataaaaagattatatattcgcttatatgtataatgggtgtatcatctttaataataattatatttggatttaagaaaaactagggggaaaagtatgaaaaagaaatttgagagtacttatggtaagaccattagaggaatattttttgtcataaatccagttaaaaagaaagttataaaaacaacatgcattattcataaatatataaattctctagcagtagaaatattaaaaaataaaagaaaagcaaagcaatataagtttttcagtgataatattgaagctataaatgaaggaacggtttgggcagatcaggattttaagtcaacaaatcattttttcgattttgaaaaaggaagaggactatatggattttctaatttagtagatgaagctcaaaaatattataatatgtctttaaactatctaagagcaggagataagaaaaaatctctattttatcttggagcagcgtgccacataattcaggattcaactgtcccgcagcatgttaacaacagacttttaaatagccacagaaactttgaaatgtggattatacaaaagtttttatctggatatagatttatgaaagcagatgaaataattcgaagtgataatacaagagattatataagaaagaatgcaaaagttgcaaataaaatttataataagtgttttactataaaggataaagaagctaggtatgatgcaatatcgaattatattatatgtcaagctcaaatgagcacagctggcttaatgatggattattacgagaaatatgaggttatatacaaaaaccatagtacatcagaaatggtaatgtaaataaaaaaatatagggtttaaattaaataccctatattttttcatttttatgtactattttaagataaaaaataatatctatatttatatattaatatataggaggtattatttatggaaagattatttattaatttagaaaatgaggttttacatgggaatgttttagatgtaggtagtgaaaattatggaatagtgtatgaactatgcaaaaagaaaaataaaaatatttcagatgtaaactacgtttcaggaagagaacagagggaatatataggtaaaaattcctatgacagctgtgtttcttttttttcacttaaggacttaagaacggatagagataaaaagaaatttttttgggacatgtatagcttcatgaaagataatgccgttctatatttgtgggacgttgataaaagtatatttcaaacttttaggaggagtattcgaatagttttgcctggtgcaaaaataaaagacatagaggtaaatgattttaatgtactttctaataattcttgcaaaaaaatttgcaatatgatgtctcagtattttaaaattatagatgtgaaatgttcaaatgacctgtattacataaaagcagagaaaaaggaaggtaatttcaatgaaaaaagtacttcttacagcaataaattctcaatttatacacagcaacttggcagtgagatatttaaaggcatacgcaaaggaattagacttgcaaattaagataagggagttttctattaacgataggcttgagagaatattcgaggagataatgtatgaaaagcctgatatagtaggcttttcatgttacatatggaatggtgagtatgtagataaattaagtaatttaataaaaagagttgatgaaaatatacagatattttatggaggaccggaggtatcttttgactgcagggaagtcttattaaatagttctgctgattttttaatagaaggagaaggagaggaaagttttaaagagtttttaaaatggaaacttgaaaatggatttgatagaaaagatcttaagataaagggagtatatagcaagtgtcaaaatcaaatactttatggaggacaaagagaagctcttgacatgaatttgcttgaatttccctacaatgaagaagatgacctatcaaataaaataatttattatgaagcttctcgtgggtgcccatttaactgtaaatattgtctttcttccactataagaggagtgcgctttttaaatccagacagagttaaaagagagcttaagtttttggctgataaaaaggtaaagatagttaaatttgtagatagaaccttcaatgcaaatcctaagtttgctatggaaatatggaagtatttgatggagcttgatacagaaactgtattccactttgagataacggcagatattgtaacagaggatgaaattgagcttttaaaaaacgcccctaaagggagattccaatttgaggttggagttcaatctactaataatgaagttctcaaaaatgtaaataggtacatagaatttaaagatataaaagaaatagtaatgaagcttgaagagggaaaaaatataaatcagcatttggatttaatagtagggcttcctggtgaggattttaattcctttaagaactcatttaatgatgtttactctataggtccagaaaagcttcagattggatttttaaagctcttaaagggatcttcaatgagagaagaggcagagaagtggggaatgtcctattcgccatatcatccgtatgaaatcttaagaacaaaagatataagcttcgaggaaataagcatacttaaaagagtggattctgtggtagataaatattacaacacaggaaagtttgatcatatagttgaatttttgatttctgattttgaaacaccatttgatttctactacaagctttcagagtatttttatcataaaggatattttaatagaagtatatctgcaagtgaatactataaagtttttttggattttaataaagagattctaaaaaaagaaaatgatgtattagaggaaatagttaagttcgaatatcttaaattcaataagaaaagttggcttccaccatttttgactaggttaaatgttaaggaagaagagcaggctataaaggaaaaattaaaagaagaaaataaatttgataagaagcttcatttggaaaaattctcaatagatattgataggtacataactaaaaaagaaattgtgtataaagaaatgtatcacatatttaattaaatagcattttaaggataatagtttattatgaaattttcatgataaactattatttttgtatatatattaatttatttacaataaaagtaataggtgttaatattaataatgactatataattaatagaagaaatccaagtgtaaaggagagtaatggttatatggaaaatgttatacataatagccgctggataatgaccccagaggtaaaagaggattgtaaaatgagattattctgtttaccttttgcaggaggaggagctttagcatacagaagttggtgcagatacatgccgccggaaatagaattatgtgctgtgcagcttccaggaagagaaaatagaataaaggatgaaaaattttatgatattaatttgcttattgatgaattagttctccaaatacttccgtatttagacaagccgtttgctttatatggtcacagtatgggtggattaatttcttttgaacttgctagaagaataagaaaagtaaaagggttaacgccaaagatattatttttctctggatctaaagcacctcagctatatgatcatacgaaggatataagtcatcttcctgatgaattgtttttaaaagccataaaaagctttaatggtatgccagatatgttttggcaagatagagaattaattgagtttaaacttcctacattaagagcagatttttctgttttagagggttacaactattataatgaagaacccttagagtgtcctatatcagccttgtgtggagaaaatgataagattataagtaaaaaagatatggaggcactagctttacaaacaaaaaatcagtttaaattgagaatgtttgatggagatcatttttttataaatacgtgtcgttctaaagttttaaaaagtataattgaagacttgaatgaataccttaattaaaaattataaaaaaatcagatggatcatttttttataattatctatctgattttttatactacttttagtattatttttcatttcttaagtttttcatgcttatatctaggacattgaaggaatgtgtaagcataccagaagaaatatagtcaactcctggtacagctttttcacggatattttcaaaggttatgttaccggaaacttcaattaaagctcttttatttatgagctttacagctttttttatagtctccacatccatattatcaagcataattatatcagccttagcattaagagcttcactaacctcgtccaaggtttccgtttcaacttctatttttcttacaaaagaagaattgtttctggcaagatttacagcatttgttataccataggcagcatctatatgattatcctttattaaaatgccgtcagaaagaccaaatctatgattatatcctccaccaatttttactgcatatttttctaaaagtctcataccgggagtagtttttcttgtatccaatagctttacccctgtgccctctaagcgtttatttaaattggaggttgtagtagcaataccacttaagatttgcataagattaagtgcagttctctctccagatagaatggagtgagtgcttccaaaaactctgcctataatttcaccttttttaacctttgagccatcagaaatagtaaattcagcttctgctcctttaaaaatttcaaatacacgtttaaatattcctatacccgctataattccatcttcttttgcaataatatctgcagtgctcttagagctttcttctattattgcattggtagttatatcgttataagcaccatcatctattaattctttttttataaaatcatcaaatgttgaccaattcatttttcttttcccccaaaatggattcaaatttatttattacaatatttctgttgcattttataatactaagtgcatcagataaagttaagttctcatttttttcgtttctttcaatgaaggaaatgctatgatttatattttcggcagcccttttagaaaaaactagaccctcaagaagtgaattactagcaagtctattagctccgtgtacacctgtgctgctaacttctccacaggcatataaatttttcattgaagttaagctattaaaatcaacttttattcctcccatgaagtaatgctgaacaggagttacaggaatcttattttttgttatgtcaagtcccctagaaagacattctttgtatattccgggaaatcttttagttataaaatctgcatccatagaggttatatcaaggtatacatatttactgttgtctttttcttcttctttataaatagcatttgcaaccacatctcttgggagaagctcgtctacaaatctttcgttttctatgcttaatagttttccgccttctcctcttacagattcagatattaaaaattttttttcttgagtattactatcataaagtgctgtaggatgaaattgaatgtagtttaagtcgcgaacgtctatgttatgccttagagccatagcaattccatcagcagtaagagttctttgattagtagaatttttaaataaaccacctataccgcctgaagctaaaatggtagctttagaatgaaaagtatagatagtattgttttttagtgctgaagctccaaaacatatgttgtcctcagaaattaagtcaaacacctgaatgttttcgataatctctatattaggtcttttttttacctcattataaagagtttcaaaaactacctttcctgtttcatccgtactatgaactattctatttacgctgtgagcgccttctcttgtataatttaaacttccgtcttcatttttatcaaacttcataccaaagtttattaaagtatctatgttttgtttagattcagcagcaagtattttaacggattctttaatgtttctatattgtccagctcttagagtgtcatcaacaaatagaggctcgtcttttttatttaatgcagttgatattccgccttgagccaggtaagtattacattcacaagcttttgattttgttagcatagttacctttatatcattttttaaagagagggcagaatataaaccagcaacccctgtgccaataattaatacgtcagtttgaatattcataaataaatcaccttccaagtattaacatattttctagggaagtaagtgccttttgtcttaagttttcttctatatttatttcaaaagtagaatttacaagactattataaacatcttctaagtgagttgctttcatgtttacacaaaccatacttcttagaggataaaaagtcttattaggtactctttcctgcattttatacattattcctgtttcagttacaactaaatatttatctgaggtcgtatctttttcagcataatctatcattgcacctgtactacctataaagtctgccatatctcttactggcttccaacattcaggatgagctagaattttcatatcgccatatttatttttcatttcttctatatctgttgggattatcatgttatgaactttacagaagccatcccataaaattatatttttttctggcaccatttcttgaacataggaacctaaattcttatctggaagaaatattatttcatcactatctattcttttaactatttttgctgcattggatgaagtacaacaagtatcacataatgctttaacctcaactgaagagtttatatacgagactacctttgcattagggtgcttagcttttagagctgcaaggccttctgcatctgccatatctgccattggacagccagcttttggttgcggtagaagaacctttttttgaggtgacagtacttttgcactttcagccataaatttaactccacagaaaactattgtatcagcatcgttttccttggcaattttacttaaattatatgaatcaccaatgaaatcagctatttcctgcacctcaggtctttgatagtagtgagctagaattatagcgtttttttggcgttttagttctaatatttgttcctttaaattttgatccattaataagtacactcctttttttattgtaaacaagatacagtaaattattttagtgtatacaggtgtatatacattaaatataatatacatctttgttagatatttatcaatacaaaaatgattacaaatgttgacttattaccatattaactatatatttaactatgaatgtagtttttcgcgttggaaataaggggtgtatgtgattgtctatagaacaaaaagagtttaagtatgaagaggataaactgaaagatactgaaaattggatagaaaatcagatatctgaaataaaaaaagataacgttgaatttgaaaacaaaatagtagatttaaaaaaacaatctaaggggaagtacagtgaagaactagaaataactgaaaaactttacaatattacacataaaaatcttgaaaaatacaatgaagctaaggtaactccatactttgcgagaattgattttagagagagaaaaagaactgaagttgagagctattatataggaaagtttggactaggagatagcagaaatggagaagaaaagataatagactggagagcacctattgctgatttatattatagtggtactgctggtaaggttgcatataaaatttattcaggctatgtagatggggaactttatctaaagagaaaatttttaatacaggataaaaaactaaaggatgcctttgatgatgcaataaatgaaataattttaaaagctcaaggtggttctgagaataatctagttgatgagtttttaagaataaatcttgaaaagaatgtaagtagtaagttaaaggatgtagttgcaactatacaaaaggagcaaaatgatataataagaagtgaaaaaaattctgcacttgtagttcaaggatcagctggctcgggtaaaacaactgtagcacttcatagattagcttaccttatatataagtataataagtccttaagtggaaaagatgttcttgtggtagcgcctaataggattttcttggattatatttcagatgtgcttcctagtcttggagctaatactgtggttcaagaaacttttgaggatatagccttaaaggttttaggaataaaatctaaagtatatacaaaggataaaaaacttgcatacatatttgaagataaaaatgaagaagataaaaaacttgtaattaaaacaagtaattttaaaggttctctattatttaaggaaatgatagataaatatctaaaaacaattgaagaaaaggatagtgttgtagaggatattaaaatagcgggatatgtcttatttgataagaaggaaataagaagacttttttgtgaagacatgtcacatttacctatagataaaagaaaagatgaaataaaaaggtattttaaccttaagataaaggataagattataaacatttgtgataaaatttcttttacatacgagtataatattgcaagagtaaaaaagaatatggaggacggagtagagagaagaaagaaattaatagctctttacgatgaaagagacaataaaagaaatgacataataaaaaatgcaccagttgtaatggacaattattttgaagcttggaagcatacagatacagcagttattctggatagattttttaatagcaaagatgtatacaatgaactggcaaaaggaaagatatcacaaagtctttggaagcacataaaatcagaatttaatcaaaatagagagaaaaaggtaattgacagtgatgatttagctgcaatgctgtatataaaatttaatatagaaggaaatgataaatttaactttaaacacataataatagatgaagcacaggattacagtatatttcaattttcagctttaaaaaatttatgtagtagtaactcttttactatagtaggtgacttagggcagggaatatattactataaaggaataaatgattgggcttctataaataaaaatgtttttgaagataatttcaattatgtagcacttagtcaaagttatcgttcaacagtggaaataatagaatttgcaaatgaagttttaaagaaacaggatataaaattggaaccagcaaaacctgttttaagacatggtgataagccagaagtaattgaatttgctactaacaaggaatttgtagagagagcagatgagattgtagaaaggcttgaaaaactagataagaagaatatagcgattataggaaaaacttatgatgagtgcaaaaaaattaacgacgctctaagaaaatatagtaaaaataagtggaaagtaataagggaaaatgataaaagctttgaaacaacaaaaatagtcataccgtcgtatataactaagggacttgagtttgattgcagtattatctataattgcagtgaggataattataaagatacagaacttgataagaagacactgtatgtttcacttacaagagcgctgcactatgaatatatctttttcaagggaaaaaaatccagccttattaaataataatttatattatttaataattattattgaataattttatttttgtgttataatatatatataataatacgaaagaaaaaaaccaaagcagctataaatttacgtatgttacaaaatgtaatcaattgttaataaattatattttaattgaggttaactttggtgtaattaatgaaaataattatttagtgttgaggaggagttaaaatgagtgctgaaaagctttgtgaaaatgtatattgggtaggtgtaaaggatcaaaaattaagagtgtttgacataataatgaatacaaaaaaagggtcaacatataattcttatttaattaatgatgataaggttgcaataatagatactgtaaaagatggtttttatgatgaatttttaaaaagtattaaaagcgttataggcgacaaaaaggtagactacatagtcgtgcagcatacagaattagatcacagtggttctatgtatagattgataaaagagtatccagaagctaaggttgtttcatcaaaagcagctaatatgtatttaaaagagatagtaaatgatgaatttaatagtttagatgctatggaagtgaaggagcttaatttaggtaaaaatacattagaatttatatctgcccctaaccttcattggccagatacaatgttcacttataataaagaaaataatatactatttacctgtgatgttatgggatgccactattgccctgatggaagcataaaggatgagggtggagaagattatcttccagaaatgagatattactttgatgtaataatgtcaccttttaagaagtttgtaaatatgggtttagataaaattaaagatctaaagcttgatatgatagctccaagccatggaccagttcatattaatgatatagaggaaagtgtgaagctttatagagagtgggctaaagaaaaggaacctaaggagaagaacgttcaaatattttatattactgcctatggaaacacaggtatcatggcaaaacatttatgcgaggatataaataaaaaaggtgtaaaggcagaagtgcatgagataactgatatgaaaatggaagatatagttgaattgatagcagatgctaatggagttttggttggttctccaacaataaatcaagacgctgtaagacctgtatgggatgttctttcatcagtatgtcctatagttaatagaggaaaggcagcagctgcatttggatcttatggatggagtggagaaggtgtccctatgatgatggatagattaaagtccttaaagtttaaaactccagacaatggtcttaagtttaaattcgtacctgctagtaaagagttcagcgaagccgataaatttgtagatgattttataggtttattataagaaaagagttcatggcaatttatgagtagccatgaactcttttttactaaaatcctttttctttaagatctgatacaatttcaacatacttctcaagtacatcaaagcctttgtaatcttctcttcttaaatctataatatctccatgagaaatgccacgtcttctattatttcttataactcccttaaagtgtccccattttgcagaatcaatagatactaaaccatcattttcgccagacgttagcttcgataaaacgtagggaatagatactacataatcactaaatatgttttttactgctgttgcatagctttgataataaacccccggtacgtcttttacttcctcattaaactttgaactactgtaagtagaaaattgtctactagctgtatagaagtcaggatttttatcacctagaattttataatatttgtcaaaaaaatttgaaacagctctgtagattttatcggggattttgcaggctatatcaacaaatttacatcctctatgtggtgaagacatcattgtgagggatgctacatattttcccatttcaagtttgctaaccatgtaacgtgagtctaacccgcctttagaatgtgctattatatttaccttttcgcagcctgtttccttaatgatttggagaattttgtttttcatatactgtgcattgtattcaacagttccccaggcttcttgatttccgtaataaatagttgcaccgttacgtatcagttccttagggattcttccccagtaattaatatattttagatctctaaatccaacaccgtgaactaaaacgagaggatactttgttttacatacatgagaatccacgcgttccttatttgtgattactttatataggtcgtgatcatattcgattttagctgtatgacaagcatataacattgcaaaaatatttataattggaataaaacacacaaagccaacgataaatcttttagctatatttaatcttttagaagtacataaaatcctgatcataccatttgtaagtaagatgaggatagctataatagcaagtataagatctattacaaaaatatgaataggagctgcatctctcatttttactaaataaactatgtataataatatttgaatgagagaggtgtacaatccaaatagaacaattctttctccacctatcattatccttaatctaagacttgctgcttgcttctttatacttggaaatagatttgcttttaaccaaacataaaaaatgaagaaaaaaatctcaattgaaataatccatttacacacaatattagtttgtccaatattggtatgatgattaataaggtaataaataagcacaatatgaggagcaaaaataagatatatactcataaatgctttgttaagtaaaggtagtttttttccaatgtccagtaatattacgctaatcaataatataaatgagataaaagatattagaaatgtcataaataaattcatcctttgtttgttaatattataaactcactacaatatatcacattttgtggtaaatttacagttatatatatacatttaaattaaataataactaaaaaagaatggactattgacattttacaagaaaagtaatagaataaacacagtgataatcattatcatttcaaaatgaaaatcaaattcatggttttttattattagtgtttgaggagagtgatattatgacaaaaggtataggtcttaatgaagttgaaataaaatcaaaggttaaagttattggaattgtaccagagagtaaagttagaagaaaaataatggacatggggatagttagaggtactgaaatatatattgagggaaaagcacctatgggtgatccaatagcacttagacttagaggatatagtttgagtttaagaaaaagtgaagctaaggatattttagttgaagttttataaaagggagggttttaaatgattaataaagcaatgcctttaaacatagtttcagcaggaagagatgcagaagttagagacataacaggaactgaagtaatgtgtaaaaaacttatggaaatgggttttaacaatggtgcagtgataagaattattaaaaacgatgcagctcatatagtagttaaggtaggagaaacaagattggctttaaataggggaatggctcaaaaggttatggttgcagaagtttagtgaggttacaattttatggaggtttgatgatgaatagaaatttagtagtagctttagcaggtaatccaaattgcggtaaaacaagtctttttaatgaacttacaggttcaaagcagcatgtaggtaattggccaggagttacagtagagaaaaaggaaggtaagcttaagtttgagggaagagaaataactatagtagatttaccaggaacttatagccttggcgcatattcagaagatgaagtagtagctcgtgactttatattaaaggataaaccagatgtagttataaatgtagttgatgcttgtaatcttgagagaaatttatatcttaccacccaaattttagaaacaggtgcaaaagtagtattagcgttaaatatgatggatgaagctaataccaggaacatagatataaatattgaaaaacttcaaaaatccattggcataccagtagttcctacagtagcgacgaaaaagcaggggataaaggaacttgttaaaaatgcaataaagctcggtgattctgaaagtgaagagttatatacaattgattatggtagcgatattcaaaaggaagtagatggaattaaagctgctattgatgaagctagtgtcactttagaatatccaaaagcatgggtatctttaaaacttttagaaaatgatgactacataagaaaatatattgataatagtataaaagatgacgaagtgaagcataaggttagtgagggaattgaaaatttaactagcatcattgggtatgaaccggatgccttcatagtagataaaagatatgaacttataagtaaatttgttaaaaacagtgttaagaaaaatgaagtacaagaagaaagtacttcagataaaattgataaggtattaactaataaatttttaggcataccaatatttgcaataataatgtttgcagtatatcaagtatccataaattttggaaatggaacactttcagatttgataaatgattctcttggacagcttggaactaatatagcttttactttggatggttttggtgtacctaagattataggtgcctttgttagggatggtgtttttgccggagttggttctgttttaggtttctttcctatgattttaataatgttttttcttatatctcttcttgaggatagcggatatatggcaagagcagcatatgttatggatagacttatgagtgctgtagggcttcatggaaaaacagctgtttctttaattgttggaagtggatgcaatgttgcaggaataatgtcagcaagaacacttgagagtaaaaaggatagaatgattgcaattcttataacacctttcatttcttgtccagcaaggttaactgtttatggtgtgtttgtaggggcatttttcgcaaaacaaaagcttggtatatttagtttaggcggaattataatatttttactatatgcacttggtatatttgtagctatatgtgcgggaaaattctttagttcaaaggtatttgaaggggaaacttcatattttgttatggaacttccaccatatagactcccaacacttaaaggtatattaatacacatgtgggaaaaatcaggacacttcttgaagaaggctggaactataattttaggagtgtgcataatagtatggatacttgcggatttaccagcaggagttgagtatggaagtaaagattctcttcttggaattataggaacctttattgcaccaatatttaaaccagcaggttttggatcatggcaagcaggagtggctcttataactggatttgcagcgaaggaagccgttgtgggtactcttggaacaatatacggagttaatgaaggaacacagcttttccacgcaattcataatacttttacaccgttatcagctatatcctttatgataatgacacttttgtatgtaccatgtgttgctacaataggtgctgtaaagagtgaaacaaattctaataagtggacagttgctgtaattatatatacttgcgtaattggttgggtgcttgcaacaatattctatcaggtaggaagattgcttggatatgtatagccaaacattgagaatgaatattattattataactaggagggatagctttgttgatgaaaattcttaaaaggttaaaggatggaggaatttactccaataaattaatggcaaaagagcttggtgtgagtgaatcaataatagagcaaatgatacttcaacttgaacaacttggatatataaagaaggatattatgacatcgggctgcgattgcagcagttgtgctcctaaaaagaaaagctgctgcacaggtggtaatgtaaaaattgatttatggaagcttacagaaaagggaaatagagctatttagagataataaattcaaacaagttaataattaaaaattataaatattatgaaaaaagtgtttaaaagtttagtttaaacactttttcttatgagatatttggtgtaaaatataagtgtaagttactataatatttaattaaggagcggtgattcattgaggggagaaaaatgtgttgtatgcggtaaagatggtgaaaggcaccatatagtatataaaagccaaggtggactcgattttcctcttaattatgtttatttgtgtgacgagcaccatagagggattaatggacctcataaggacaggaaagttgatttaaagtataagcttaaaatgcaaaaaagtcttgaaagcattttgactaatgaatattataaaataaaggatcttataaagcttcttcaaatcaatcaaagacaagctaaaattatgactagaaattttaagctttataaagaaggttataggaaaagagatataataaagagaattatgggtggaaccttttactatagtgacatgttaagtgattactatgatgactctttgtataggttgttagaggaaagaattaaatagatatagagaaatcatcttaatttaaattgaagacttaaattaagatgattctttacattttgattacatttcttcttctacttcttcttctacttcgttagctaaaagttcttcagctaatctttttgtgattttattaaaatcttcttcaaatagtataccgtctataatttttgatgttagtaaatttccatctttatatacacttatggaatcacttttacctttgaacaaaaatccgtttatggttctttccataataaagcctccctaatacataactaatacatataacaaaatgtatttacttttcattatacaaaatacaaagtaaattttcaatacagatttaacataagtttaaaaaataagttattggaaagaattatttatggaggtgctttatgaaaaatattatagtttgcagtgacgatgaaatgtggataataaaattgggactcttaaattataacaactttttattaaaagaaaaaattaaagggaacaacaatgtcattgataggcgtgaaaaggtgaaaaagattttacaggaattaaaatagcaggtaaaagtgtagtaccattacctgctttattattgttaaaatttatgtgtattgaatttttaacatattagtagttccagattcgcctacaggaacacctgcaactacaacaactaagtcaccttttttaattaaattctcgttaagtgctctttttattgaaacagatataagttcatctgttgaaacaactttttcagatgtaataggtgttataccaaagtttagagcaagtcttcttgcaacatcatcatgaggtgtaacagctattatagggcaagttggtctgaatttagataccattcttgcagttataccgctttgagtagctgttattatagcagcagctttaagttcagcagcagttgagcatgcagcaagacttatagcgtctgaaatttttgttataatttcaccttttctttcattaagagctttagtatagtctatttgagattctgttttttgtgctatctttgccatagtttcagcagcttcaattggatataaaccacttgcactttctccacttagcattatagcatctgttccgtcatatattgcattggcaacatctgatgcctcagctcttgtaggtcttgggtttcttatcattgaatcaagcatttgagtagctgttataactattttgcctgcatcattacattttcttattatcattttctgtattgaaggaacatcctctattggaatttcaacacccatatctcctcttgctaccatgattccatcagatagttcgagaatcttatcgatgttatcaacaccttcttgagtttctatcttagagataactcttatatcttctccaccattttctttaagaacctttctaacgacagatacatcttctgcttttcttataaaagaagcagctactaaatcagcttgcattttacatgcaaattttaaatctaatacatctttttcagttacagcaggaagacctatagaaacaccaggtacatttacacctttatgatttgaaataataccattattttttgccttacaaataatgtttttgtcttgtacatcagttatttcaaattctaaaagaccatcatcgacaaggagtaatccacctttttttacatctttataaagatcatcataagaaacggagcatttctctgaatttcccaaaatttcgcttccacacattactgtgaaggtttgacctttttttatttcagctttgtcattttcaaaattatgagttctaatttttggtcctttgatgtcaactacaattgcaacatttttgttcagttcttttctaagtttttttataatatctattttttctttgtgatcttcatgagtgccatgtgaaaaatttaaccttgcagcattcattccagcattcattaattcttttaatttctcctctgaatcactagagggccctattgtaaaaatcatttttgttttttgcactataaatcactcctaaaatttattaacaaagcaattataccacataaaataaaaataaatgaagtataattgcttaaaaacttatttcaaggttttaaagacataattttgcgattttaaaaattgtattatttctggaagcgcctgtaaggttgcttcattggaagatgaatcatgcattagtattattatcttatcgttgtttttgtaagaggacttaactgaatttacaatatcgttaggtaatttttgttttgtcctaagtgcatctttagaatctatatcccagtcgacaaaattatagccggccttttttatggattttttgaaattcttacttaccatagtagaaccacccggaaatcttattagcttcatattgaactttccatcacctagtattgctcttaaaatgtctctacattcattaatatcattaatgtattcagttggagatgagtatatttttgtgatattattgtcaaagctttttatgcctatagagtttcctgactgcgcttcctttgagagagttagcttgtttattattgaatttttaccagtaacaaaaaaggttgcttttacatcataggtttttaaagtatcaagtatgtaaggagttacattagatgatggtccgtcatcaaaggtaagataagctgttttttcagttttagtgttgctgacattctttgtttttatggatttttttgaaagtttagtttgcaggttgtcggtatttgaagttttattataggtttctaaaaaatctgttttgacaatatatgtggcacctagcactataagggctattgatagaatcatagcagatctttttaaaattaaagaaattccatttgttttcattaatccccctcctaaatacttaatatagaaataattttgaaattttgttatataaaaatgcaaaagcgtaaaatacttacattatatattgattataggagttttaaaaagaaaaataaagggctttatgaaaacatgtgaaaaaacatgacatttttatagataaggaacctattaagataggttgaatttatcaataagctaagtaaaattactttaattacattagtttgttttaatatgttaaaaaaatgtagtaaaatattagatgaaataaataatatattatttttagtagtttttattaattattttggtaaaaatgttatttttgaaggaggcaaattatgaagtattgcgtaaattgtggcgcacaattaaatgatgatgatttattttgtggagcgtgtggagctaagcaaccagaatcatcaaaagtgggaaatgcagtagggaaaattcaaaatcttaatttggattttaagggagtagttaaaagtttaggaaatgtgtttttaaaacctgtatcagcgtctgaagaatttgttcaaagaacttcaaggaataattctatattagcaacattaattttattgcttatatctgcaatattaggtatgtggagaattcagcaggtattatcaggaatagagaagctacttacaggagtgcttggtagttcacttataggaaatattattggttctacaagtaggtattttgatgcaaaacaagatttacatatttcatatggaatgatatttattgaaaatgcttttgtttttatacttgccgttgcagttatatttggagttttatatctagcattaaatgttgttgataaaaataaggttaatattttaacaatatataatattgccgttgtatacacagtgccatttttatattttaaattaatatcaataatagtatcgtatatatctaattcagttggtatttttgtagaattaataggacttataatttctatagtaacattagttttaataataagggatatatttaaagttgataaagataaggcagtaattattacggtagttgtttctataatagttatatttatagcgatgttttgcttaaatagttttgtacaagctaatataaaacaaattatgcagtcccaaatagatggagctaagcttaatatataaaattaattattgtttataaaaggaatacagttaaataaatatgattcaacagctaaataataaaaaaccgccaaaatggcggttttttattattttttggttattgcacattcatcttggcttttttctgaacgcttagtacttgaactaaaagaaagtattataaaaccatagagaagagttaaggcagcaaaagcatatggtagaaaaattcctagtgaatgaggaactatatttttaataagtctatcctcaaatatcattgaaaaagcagtgtgggcaagaatagcgccacctatatatattactatcttatattttttcattaaggttgctacatattgacttccccaaaatattattggaatatttaaaatcaaaccaaatacaatcaaacctatatgtccttttgcagctgctgcgatagcaagtacattatctaagctcattgtaaagtcagctaatattatgctttgaattgctgctaacattttttttgaattatgtactgctttattgctagattcttcatgaggttttataaagtcccaggttattttaactaaaattattccgcccactaacttgataggaagccactgaatcataagtatgtaggttattaagcatgcaaaaattattctaagtgtcacggcagctacaaccccaataaaagaggctttttttgctaatgtttttggtaaatcttttgttgctaatgcgataactcctatgttgtcaccacttaaaactacgtctaataaagttatttgtaatgcgcctaaaaaaataggtattaaattatccatttttcctccttaaatttgtacactacagtggtttatgaaaacataatttgtacagtaatctatatacagtttataataagtatagtaaatctataatttccaaaaagtaataaaatatgatgtaaaaaaaataaactcataaaaaggtttttcaaactgcatataatggttgtaataatcattatattattaaatatagaataattcaagactataatttaaataaaaaaattatggtcaagactattatattataaatgggggagaatatatgttacttataaaaaatggaaaaattattaccatgacaggcaagaattacgataagggatgcgttttaatagataatggaaaaatagttgatgtgaatgaaaatataaaagagaataaatacatgaaagtaatagatgcatcaaattttacagttattcctggaataatagatgcacattgtcatataggaattgatgagcaggatataggaaaagttgggcttgatataaatgaggtttcaaatccagttacaccaaatttaagagctatagatgctataaacccaatggattctgcttttaatgatgctgttatgggtgggattacaggtgttatgactggtccgggaagtgcaaatgtaattggtggacaatttgtctttatgaagacctacggaaaatgcattgatgatatggttgttctagaaccggctgcagttaaggctgcgttaggtgaaaatcctaaaagagtttatggtggaaagggcaaggctcctgtaacaaggatggcaatagcagctcttttaagagaagctcttacagaggctgagaattataaaaataaaaaggaagctttaaaggcaaagggagaaagaattgaaaagaatttaaaactagaagcattaattccggtaattgagggaaatattcctcttaaggttcatgctcatagagctgatgatatactgacagctataagaatagcaaaggagtttaagattaatattacattagatcactgcacagaaggacacctaatacctgagaaggtaaaggagtcagggtatccagttttagtaggaccatcgcttacatcaagatctaaaagtgaggtctcaaataaaacctttaaaactccaggtgtattagcaaatatgggtataaaaactgcaataataacagatcacccagttataccaattcagtatctgcctatttgtgctggactttcatgtagggaaggaatgaaagtagaagatgctctttatgcaataaccctaaatgctgctgaaatttgtggtgttgcgtcgaggcttggaagtattgagaaagggaaggatgcagacatagctatcttcgatggtaatccaatggaggtatttacaaaaacaatatacacaataattgatggcaatattgtatataagcatgagtgttattgattaatatttaattgtaaagtataataaatgttgttataatatataataataatataaaaatctatgaagtggaaagtagcatgtcgattttttaagcgagctgatattttggtgaaagttcagtattaagacatatgtgaaatagagccatggagatgaattatccgcttaacgcgttaaaatttttaaggtggacttttattaataaggtcaatcagagtggtaccgcgaaatataatcgtctctgcagttatgtagaggcgttttttttatatttaaatctaaggaggcaaaattgtggattacaagaaagtaatagctgaaagaattaataaaattgtagatatggatgttgaggcactttataaaattatagagataccgcctaaaaaggacatgggtgattttgcacttccatgtttccaatttgctaaagtattaagaaaagctccaaatgctatagcagaagaagtatgtaaaaaaatagatcaatctggttttgaaaaagtagagaatttaggaccttatatcaatttctttgttgataaagcagattttgcaaaagaaacaatagagagtgttttaagtgaaagagataactacggtcgttcaaaagtgggagaggggaaaaaggtacttattgaatattcttcccctaatatagcaaaaccttttcatgtgggtcatttattcggtacagtgctcggaagttctctttataaaatattttcaatggaaggttatgactgtgttagaataaatcatcttggagattggggtactcaatttggtaaacttatatctgcatataaaagatggtgtgatgaagatgctctttataaggatccaataaaagaattattaagaatatacgtaaagttccataaggaagcagaaaaggatccactattggaagacgaaggtagaatgtactttaagagacttgaggacggagagaaagaagaagtagagctgtggacaaaatttaaagacttaagcttaagagaattcaaaaaagtatacaatcaaattggagttgagtttgattcatatacaggagaaagcttttatagtgataaaatagatgcaatagaagaagaacttaatgaaaaaggacttttgacagaaagtaatggagccaaggttgtaatgctagatgaatacaatatgcctccatgtataattaaaaaggctgatggagcaagtatctatgcaactcgagatttagcagcggctgagtacagaaaaaagacctataatttcgataagagcatatatgttgtaggacttgagcagtcacttcattttaagcaatttttaaagacgctagagcttgcaggtcatgaatggtcaaaggattgtattcatgtaggttatggtcttgtaagatttgcagaagggaagctttcaactagaaatggtgatgttatattccttgaagatttactaaaagaatcagttcaaaaaacaagtgaaattattgaagaaaaaaatcctgaacttgacaataaggaagaagtatctagaaaagttggaataggagcagttatatttacttatcttaagaatggaagagaaagagacataatatttgattggaaggaaatgctaagttttgaaggggagacaggaccatatgttcaatattcctatgcaagagcaaagagtattttgagaaagcttggagaagtaaaaggtaatgtaagttatgataaacttgtttcagcagaagaatttgacttgataaaacaacttaaaggctttaacggtgctattttaaatgctatagatagacttgagccatcggttataactagatatgtaatagaggttgcaaaggcgttcaataaattttataatgcctataatatttcaaatacatctgatgaagaattaaagaatgcaagacttgctcttgttgaggctgcttcaatagttataaaaaatgcacttagtctcataggaatagatgtagttgaagaaatgtaaggagggaaaatgcacatggcgtttagtattaaaacactggcaatactttttttacttatgattgctgtaatgagcgtttataattttacaaaacgtttctttatatcaaagctaaataaatgggttatactagcttttataataattatgttttttgctgcaaacataattggtgctaggcttaaaataggagtttcgggttttaacataaatcaaatagtttattatgctgttatggcattattcctatttggattatatgccttctttgatgtagtaggttggagtaaaacttctagagctgaaaaaagaaatacaggcaagaaaatggtaataaaacccaaagcaaagccaaatagagttaagaagaaggatggaaagtaatacttttcatccttcttcttttgttgaaaattaacagtatcttgttataaatatattaaatgtaaaaaaatatggttgaatttccataaaatggtgatataataatagaaaaagagttcatttgcagtaaggagaatttatatgagaagttatcaaatactgcctattggcgtaaagctaaaaaagttgagagagaaatacaaattaaatcaagatagtttggctggaaatgatataactaggaatctcataagccagatagaacatggaaaagcaaatcttactagacatgcagcagaaataatgctaaaaaatttacaggagatttgtaatagaaggaatataacaattgaagaggatatagaatatttaatagaagatgaagcatctcaagcaaataaaatacttgatcagtacataaaagaattaaaggatttaattgtatacaaggatataagtttcgttgataaattaaatgaagtggaggcattcctagtaaattgggatataaaggacaaaaaaatagttatttttgaattagctggagattacttttgtagtataaacaatttttataaaagcgctatatactatgaaaaagcaagatcattaataaatgtagatatggttactgataatgtagtatctattttaaggaaattatcaatggtatacttttatacagcaaaatatgattatggtgctaaatgctgtgagtttgcactagagcgttttactagtatggatgataagtataaagtgatttttttattcaatagttcactgtgctatataaagttagaggaatatgacaaggctttaaacaagcttattaagcttgaaaatataataaaagaaatagataagcaaaaatattatgaagtacttttgcaaaaggcagcctgttatgaagcagttaagaattatgaaaagagtttaaatatatgtaacaagatattagattcaatggacaagaaggataatgagcagtatataatgatacttataaatttatcacaattatatataaagctttcaaatttcaacaaatcaagagaaatattaaaccttgtattagagaatctagtaaatattaataaagagtttaaactgttacctaattttcattttgaaatagcaaaagtatatagagagttaaacgagctggaaagtgctgaagagcattatttaaaggctttgaagtatgctaaaaattattcttattattttttaatagatgatatacttttagagttaattgacatatacatacttcagaataatataatgaaaatttcagatataaaaaatgaatttttcattctttcaggtaaaaaagataaaattaattccaaaataatgttgaaattaatacgagtttacttagataaaaaggatataaactcattagaagaaatatatgaatttagtgcaaaattaatgtagaggaagggaagtgaactcatatgtttttaaaaaggcataaattaatattttcaatactacttttggggactttaattttaggagtaactttttttaaaagttctttattggcattttatcctggaatgccgtggtaaattgataacgttatcttatagttactacatggattactaggcatgtatatttaggatagcgtatcttgcatttataagaataaaggttaaagcagcttggtacgggctgcttttttagcgtttatacaaatataaaaggataattaagtttagggtagaattgtattcatatacatataatgtgatataagtttttagcaggattaataaaaatcttatgtaacaagtgtaaacataataaatgtctttaaggaggaaaatcatgtacaaaaagttatttgaaaaaggtaaaataggagaattagaacttaaaaaccgtatagttatggtggccttagctgttggagctgcaaagtctgatcaaactattggtgatgatatgatggaatactatttagaacgtgccaggggaggggttggcttaataattgcagaaaatactcgtgtaaatgatgaaaatggtgttgcagcaaggcgtcaggtatctgtagcaagagatgagcatatagcacctttaaaaaagctggttgatgcactgcatagtgaaaacacaaagttttttgtacagctgcatcatcctggtagggaaacttattcgaatttaaatggagataaaccagtggttgcgccaagtgctattccctgtggtgtttgcaaacaagaaacacgtgctttagaaacaagcgaagtagagggaataattcaggattttataaatggagccaaaagagcaaagaaggcaggagtggatggtgttgaacttcatgcagctcatggatatttaatttcccaatttttaagtccatatactaataaaagaactgataaatatggaggaagctttgaaaaacgttttaattttgtaaaggaagtagttttgggaataaagaatgcatgtggacaagattatcctataagtgttcgtttgactgtagatgagctattgaatttaaatggagtaaagcaggagtatttagatttaaatatgggaattaaaatatgcagagagcttgaaaaaataggtgtagatgttataaatgtttcaaatggaatttatgagacctttaattcactttcagagcctatgacttatgaccaggggtgtagaactgaacgaattaaggcagtaaaggaagctgttgaaattccagtaattgccgtaaacatgattaaagagccttggtttgctgaaaaaatgcttgaagataaattagttgattttattgggcttggaagggctttggttgcagattctgactggcctaaaaaagcacttgaaggaagggatgaggatataaatcgctgtatttcttgtacattttgttttgaaactttgctagatcaagtcatcccaaacgtaggacctataaaatgtgcagtgaacccaagggcagctcatgaatttaagtataaagaattcaataaaaatggagctgataaggtagtagcagttgttggagctggagtagctggacttgaagcagcaagagtacttaagattcgaggttttaaaccagtagtattagaacaatcagctgacgttggtggacaaattaatgttgcagataaacctccaagaaaggaaaaaatagattggattgtagaatatgaaaaaactcagctcaataaaatgggagttgaaataaaattaaacactaaggttactttagagtacctaaagaaaatgaagccttatgcagtatttattgcaacaggtagtgttcctttagttccaaagtctatcaagggtatagatagagaaaatgtttataccatagatgatgtgctcacgggtaaagtaaagataatagataaaaaggttgctttaattgggtcaggatcatctgggcttgagactgcagaatttctatgtataaataaaaatgatgtttcaataatagagatgcaggacgctataggaaaaggagtctatgttcagcactatttagatgctatggataagctaagtaagtttaaagttaactatatgccatcaaataaattactcgaggtaactaataaaggtgtaaaactggaaaatatagttgagagaagaattgtagattatgatactgattatgttgtgttatcactaggcgtaaaagcaaacaatgacttagaagctttatgtaaagctgagtttgaaaatgtaagagtaataggagatgcagcagctgttggaaggatagagtcatctgtgagaagtggatttgaagctgctttttggctttaaagcataaattttttacctacattgataagtttcaatgtaggtatttttaatcttcttgattattgaaagtaagaaaagcttaaaatttagaaaaatttacataaatgaaccttttgattagatgaaaggtactatcgtttaggttatgcatttaaggacaatgtgaattttagaggaaaaccataccttattgacgctaatagcattgagaaaccaggtaaatttttggggaatagtgataagtggagaattataagcttcagctaattaagaataatattaaaaaagataataaagaagagtatgttggtatggcgggtagttctagaatcattattttgtagcatttagtaattaaagtttagcttacatacgtatccaaatataatttataagtatatttgggtacgtttataagctaaatatttaaagttaagccgttttttctaatttagtttgtctttgagctaacaattccggtaaaatagatgaaatggaacctgcaagtatgaataaaataccaattatcatattaacgggaattatttcatgtaacaaaattagtgcaagaatcggtgctaatattggtttaaagaagaaaactaaagaagtggtttgagcagaggtttcttccattgccttaaagtagcaggcaaacccagcaccagtattaattaaacaaataaaacacattaaaggcaaattttttaaagagtaccctgtaaacaaaggaatattagagaaaattgcaatgccgttagaagaaaataaatttgcaattggagtaatgtgagttataccaattagaacaagcatttcaatacttccgaataaaaagccaaagcaggtaacaactatcccgccgtatttagcacatttcttttttccgaaaacaccgtatgctgcgaagattaaagttgatgctattgtaagtgcaagtcctagtatgcttagttttgtatttaaaggatctattattactatggtgccaataacctcaagaattagtgcagcaatattatttttgtgaatagcctctcttaagagaaagaatgctaaaatcgtaacaaatactggattacagctgaataaaacagcaaccactgaagccttagtattttgcactgccagttgatataaactcatacttataacggtacctaataagcctaataaggcaaagaaacgtaaatccttagttgatatagataaatgtcttttatgcagtgtattcaaagcaaaaggtactaaaaataagccgcctataaagaatctagtaaagttaagttgaataggattgaacgatttagaaacaagctttaaggctatttccattgtactaaagataatggttgttaaagctatatacatatatccctttttcaatgttattaccccccaaattaattaaagcattttatatagtatttaaatttaacctagctttagtatataataatagtaaatgtaacactaatacatattttctatattttttattcagtaaagctatattttaggggagagtaaaatggattttaaagaattgcagtatgtactagctattgctaaaaataatagtatttcaaaagctgctaaggaattatatatatcacagccatccttaagcaaatatttacagaatcttgagaaaaatttagatcttaagctttttgaaagaatgggaaataactttattttaacttatgcaggggagagatatataaaatgcgccaaggatatacttaggataaagaaaaatttagatgatgaattttttgatattttaagtcataaaaaaggaagactaaatatagcctgctcaatagtaagaagtccatatattataccagagacagttcctaagtttaaaaaattgtatcctaatgtggatataaattttttagaggaaacagaatccaataacttagacaagctagtgataaatggagaggcggatttagctatatttaattattcaaaaagtaatccaatgttagggtgtgagcttttaaaagatgaggagattacattagtagttggaagaaatcatcctttagctaaagagggaaagaagcttgaaggatgcaaatttccatggattgatataaaaaggtttaaaaatgatgattttatagttaactatacagatcaaaaaagtggagaaatggaaaaagatatatttgatagattaaatataaatcctaaggtggtattaaagacaagaagtgttgagtgctcaattcgtctagcagcgcacgggtttggagtttcctttgctttggaaactcatcttaagtatccaagtttagagaagtcacctttatgtttttcaataggtaatcctaatatcacaactaagctttttgctgtatatagaaagagcggttatttgccacaatatcttcaagattatataagtattgttaaacaggtagtataaaaaaatgacctaaagtcgtgaatttgactttaggtcattagagtataaagatattactttatttttattggatttatgatgtaaagagtagtatgtttctatttggcttttattcggcaatctaaagtattagctgcatcctgtggttgtgccgcaatctaagcagacgtagcaagtgccatttctaaccattcttgttgaagaacaatttgggcaggttatatcatatagtctttctccctgagacagcttttcttttatttccttttgtggagtgatgtcttttattccttctggttttacctgacatcttgtaaaatcgtttagttctatgtctattattttgcttattaaatcagaaatagaggttacgtatttaatatatggatgcttttgaacaaacccgtaaggttcgtacttttgcccgcggagcatttcagatatatccttaggcggaacgtgatattgaagcattacagatattgattttgagagcgaatttaaaagccccattattaacgtgccttctctatctgttgtaatgtatacttctgatatttctccattatcacgtctgtttactgttgtgtaaatttttatatcacctatttgagcagggtgtgttttgccatttcttataccaacggctctttcgcgttttatatatttttgtgtagtgttaatattttttaccatatttaatagttgagcgtaggtcatatcctcaggagctgtttttgaggcttcgtctaggcttgtgttaagaggctgactttcctttgaggagtctctgtataaggttatgccttttacgcctagtttccaagagtttatgattacatttttaaagtcttcaactgaagcgtcctttggtagattaaccgtttttgaaacggaaccagatattaaaggaactattgaagcaaccattagaatatgacccattggacttataaacctatttccgctgccgcatttatttgcagtatcgaatatggcaagatgctctttctttagatgaggagcaccttctatttttccatctaatatggtttcatattctgtaccatcatcagtttttacctttttctttcttaagatatagtttgttatatcctctatttcattttctgaatatccaaggtgcttaagtgattcttgtattagaggatttgttaaggtcatgtaacctcctccagaaagttttttataaatcacatgactgaaaaatggttctacggaggtggaagcgcagtccattgcaaaggatatagttccagtcggtgccatgacagatacttgagcgtttctaaaaccgtacttttctccagattctagagctgagttccagctgttttttaattccgagcttatatatcttaaatcttctttttcaagaatagaatgattaacaactaagggtttatagcctattttctcaaaaggtgtatcaatacttccagcagctcttgcactgtttctcaatactttaagcatgtgttctttgtttatattatatttttcaaaggcacctacttcctttgccattaaggaggaaatgtagtaggaatatccagtaagtacaccgataagtgaggaggagatagctcttccttcttctgaatcataagggtatcccattaccataagtagtgctgccaaatttgatattccaagacctgtggttctaaacatgtgagtttttcttgctacatcttctgttggaaactgcccccaatgtatagaagcttcaaggagaagttgaacaaggcctattacatgcttgtaaccttctaggtcaaaggttttattttcagtgtcataaaatttatataaatttattgatgcaagattgcaggaggtatcatctaaaaaggcgtattcgccgcagggatttgtagagtttattttgttataatctgcgttaaagtttccgtcttctccacctggacatgtatgccaagcatttaaggtatctgaaaagagaggagaagggtctgcacatctccaagaggatttgttaaatgcctcccataggtttgaaatcttttctactttgtttacagaagagtctactcttcccttaagttctatggtttcatcaggattgttttttaagttgcatacttttttcataaattcatctgaaagcattacggaattgtttgcattttgtcccgatacagtctcgtaggcctctccttcaaagctggcgtcatatcccatttttccaagtgcttttactttatcttcttcttttgctttccaagttatgtaatccattatttctggatgatccacattaaggcatagcatttttgctgcacgtcttgtagttccaccagattttattgcaccggcatttctatcaagcccttttaagaagctcattagacctgaagaaattccaccgccagaaagtttttctcctttagctcttatggtagaaaaatttgttccggttccagagcctcctttaaacaatttagtttcagttacatattgttcagagatggaatgagaacctagaagcttatcttcaattgaaattataaagcaggcggaggcctgtgttctagtataagaatctttactttgaagaacttttttctcctttgaatcataataaaaatgtccttgtgcctctccatttatgccgtatataagtgacaaacctgtgttaaaccattgaggagaatttggtgcgtacatttgatttaagagagcatatacgagttcatcataaaaaatagatgcttcattttcagtttttataattccctcatccttaagagcttcgcaccaaaagctaacaagcctatgcgcaaccattttcatgctgttttcgtagccacattcatttggtattcctgactttttaaagtattttgatgctattatgtcacatgcattttgagaatagtcataggggaattcaagatctttcatatctgtaagtacttttcctgttttatgatctattatttttacatcgacttttttccatttaaataggtcgtaaactgttttcgttttagagctttctaactcttttgtataaaatcttttaaatagtattttcaagtcttccattaaaattcctccattttaaaactatatatagtggttacatatagaaacaacactatatattgtatatgtattataaaataaatctgattttaattcaagaagtattttaaaagtaaatagttctatgataatatagtgtaagcagaatatataaaaataataattagaaggtgtttttaatgatatatagttatgatgataaaaagcctaatatacattcatctgtttttatagcgaagagtgcagatatcattggagatgttaatatagataaaaatagcagtgtatggtttggagctgtgataagaggcgattcaaattatataagaataggagagggaactaatattcaagataactctgtactgcatacaaatacctatgataatggaatagatattaaaaataatgttactataggtcatggagttatacttcacggatgtactattaatagcaactgtatcattggaatgggagcaactattttagatgatgttgaaataggagagtacactattgtgggtgcaaatagtcttattacatctggaaagaaaataccagggggagtactttgtatgggaagtccagctaaggtaataagagaacttacagtagacgaaaagcttgaaatagataaaaatgctgagcattacattgaaatgggaaaaaagtattttaaataatgaatatttaattgaaaaatacaaataataattttggatatgagattaaaatcatatctaaagcagtctaaaatatatagtaattggcttttggtgttagttatttggaagtttatatgcctgaatgaaaaaatatcaaaaacttgtatttgaatttacagccgatgctaatatattttaggctgcttgtttatttttttgatatattttgttacaattaaagaagagataaaagatgagaaaattatatggtattagaaactagggggatggtgaatttatggagatttctagatctagagtaaagcagagtacaccagtaaacacaaatagcaggcatgtatcggttaagaaagatttttcgcaaagctttaattttgcacagcagcagaaatctgagcaggaattaaagaatatgcaggatcagataaagaaaaaaggtaatagacttagtataactaaatgttatgcagatgttaaggcatataaaaatcttatacgagaatatcttgaatctgttttgaattacatgtattcagttaaaaaggacataagcttttggcaaacgcagtactttgttactgttgaaactatcgatagtaagcttgaagaacttacacaagcacttttaagtgaagaaaaggaaaagatacagatagcaggtactatagatgaaatatcaggacttatagttgatatatacaaatagaaataaaaaaagtatgctaaaattttatagcatactttttttatttctatttccaaccgttgtaggaagcatcagaaggcattctaaggtctcctcttggggaaagacttatagtcccaaccttagggccatcggggatagcagaacgcttaaattgttgattaaagaatcttttaataaataaattaaaccacttttctatagtttctctagaataagtatttttaaaggctttttctgccataaatattattttctctggttctgatccttgttttataaaatagtataagaaaaagtcgtgaagttcataaggtcctattatatcttctgttttctgagatatatttccttttgcatctttaggtaacagctcagggcttacaggagtatttaatatatctattaaagttttggaaacttctcctgtgagttctttttcagcaacatagtcaactaaataccttactaatgtttttggaatagaacagttcacagcgtacattgacatatgatctccattgtaggtgcaccaaccaagggcaagctcagataaatcacctgttccaatcaaaagaccaccttccttgtttgcaatgtccataagtatttgagttctctctcgtgcttgaacattctcataggttacatcatgtttttcttcaggatggttaatatccttgaaatgaagaagacatgcaggaactatgtctatttctctgaagtcgcagcctagatgtttacataaatctactgcattattataagttttgtctgttgtcccaaagcccggcattgtaacagttattatattttttctatctatacctagcatatcaaaggtttttacagttacaacaagagcaagggtggagtcaagtcctccagaaattccgattactgctcttttaagacctgtatgtgtaaatctcttagctagacctgcagtttgtatattaaatatttctttgcagcgttcttctctctgtctttcatttgaaggcacaaagggatgagaatctatgaatctatcaaagtctcctatatcccaatttgataaattgaaatctatgtaattaggcttaaagtcacacagtcttacactgtccttaaaggttgaattttttaatctctcgctttgtagtttttctaaatcaatcatagaagtcaagactaaattatctctctcaaatctatcattttcagaaagtattcttccattttcacatataagtaagtgaccgctgaaaactacatccgtagaggattcaaaaactccagcagaggaatatatgtaagagcacatgcaccttccactttgatttgaaataaggcttcgtctatagtctgctttacttacaacctcattagaagcagaaatgtttaatattacgtttgcacccattagacttaaataactgcttggaggtataggggcccataggtcctcgcatatctctattcctaattttaagtcaccgcatctaaatattaaatcacacccaaaaggcacatcctgctgaaaaggaaattgagcaaattgacccttaaggttaagtccttctgtaaaccatcttttttcatagaattcaacatagttaggtatgtaacttttaggtactataccaagtatagagccattaaagagaacgtaggcacagttatatagacagtagttatataaaagaggggcaccaacaacgactactatatccttatctattaaaaaatcacataactcttttattccttttaaagaattatttataagtgtactttgaccgaataaatcaccgcaggtataggaagttatgcttagttcaggaaatactacaacttttgaattgtctgctaaagctttatctatgcataacttaatatttttcacattaaaatcaacatctgcaacgttagtttttggacatgctgaagaaatttttacgaaactatgattcattgtaatatactctcctttatacattttgtagtattattatatcactaaatttaatataaatgataattgacgaaaaaacatgctataataagatttgagaataaggacaaactaaaatacgataaaaggtattaattaacccttttaaggataaaatgaaactttatttatagtaagaaataatgtaaagtatattcatcagggggggtgattttatgaatgattaccaaaaaatatggataattatagctatttttatggtggtaattgattttggaacatctggatttttattcgtatggtttagtgcaggtgcagtagtagccataatagcaggattacttggagcaccaattacagttcaaattgtattgtttgcaattataagtattgctttattaagtgtaggatacccactatctaaaaaactcctaaataggacagtaaggaagacacctcttatggaggaaaaatacattgggagggaagtaaaagctgaagctgatatggaggttggaaattctaaactaaaggtagatggaatatattggactgtgaagaatgttggtgaagctataaaaaaaggagactgttttataatcactgggattcaaggaaataaacttttaattagaaaaaaaggagagattgaataatgatagttttaattgttgtattggtacttattttattacttatttttacttcactaaaggttgtaactactggatatgtatatgtggtggaaagacttggacagtttcacagaactcttcaaccaggatggaatattgtaataccatttgctgattttacaagagctaaggtttcaactaagcagcaaatacttgatatacagccacaaagcgttataacaaaggataatgtaaaaatatctattgataatgtaatattctataaggttatgaatgcaagagacgctatttataatattgaaagttataaatcaggtataatatactcaactataacaaacatgagaaatatcgtaggtaacatgacacttgatgaggttctttcaggaagagatataataaatcaagagcttttaaaagttgttgatgagattacagacgcatatggaataaagatactttctgttgaaattaaaaacatcattcctccagctgaaattcaacaagctatggaaaaacagatgagagcagaaagagataagagagcaactatacttcaggcagaaggccaaaagcaagcacaaattgctaaagcagaaggtgaaaaacagggtaaaatacttcaagctgaagcagaaaaacaagcaaacataaagagagcagaaggtcttaaagaatcacaacttcttgaagcagaaggtaaggcaaaagctatagaagccgttgcagaagcagaagctaaggctataaataaagtaaacagatctataatagaatcaggaactaatgaaacagttatagctttaaaacaaattgaagcacttaaagaaatggctaaaggaccttcaaataagcttatattgccaaatgaaacactttcatcacttggaagcatagctgcaatagctgatatcctaaaaaaggacactattaacttaaaaaaagaagcttctgaaataaataaataaagcttctgataaatagtttaaaataaaaaacataagcatatatataaagaggtaaatgaggtaataactttaaactttcatttaccttttttatgcatttattttataaataataataataatattacattgcattatatataacttgaaaattccataaaaaaacatttataattagaaagtaaaatatatataattaagcatgcaaagttctttagggggtaataataatgaaaatattaatgttatcatgggaatatccacctaaaaatgtaggaggattgtctaatcatgtgtacaatttatcccatgcccttgcgtctttaggtcatgaggtatatgttgtaacttgtgaagaaaaaacagcgccagttgaggaaaatgatgatggggtatatgtacatagggtaactccttataaaatagatacagaggattttactaaatgggttatgcaccttaatttttctatgattgaagaatgcacaagactaatgaaaaaaattggaaaagtagatatgattcatgttcatgattggctttgcgtatactgcggcaaggttttaaaatggtcatataaaattccaatggtatgtactattcatgctactgaaaagggaagaaataatggaataagaacagaaatgcaaagatatatttcttctgctgaatggctgctaacctatgagtcttggaagatagttgcatgcagtggttatatgaaggcgcaaatagtagatacatttaatacacctgaggaaaaggtttggattataccaaatggaattgatttgaattcctttgattttgacttcgattggttaaaattcagaagaaaatatgcatgcgatgatgaaaagatagtatttttcattggaaggcacgtatttgaaaaaggaatacaaatattaatagatgcagcacctggaatagtatcagaatacaataaaactaaatttataattgctggtacaggacctatgacagaggaacttaaagataaggttaaaagcataggacttcaagataaatttttgtttacaggatatatggataacaagaccaagaaaaagttctatagagttgcaagcgtagcagtctttccatcactttatgaaccttttgggatagttcttcttgaagctatggcagctggatgtcctgctgtggtttctgacacaggaggctttggagagataatacagcatagaagtaatggtatgaagatgataaattcgtcagtagaaagccttaaggataatgtacttgaaatactaaagaacgattcattagctcaaacggttagaagaaatgcaataaagactgtggaggataagtatacctggcaaagggtttctaagcttacaactgaaatgtatgagcttataaaagaagaggcacgttacacagaatgggaccaagggtcaaataaactaaaggaagataaattaaagaagaataaagaaaagacaaaagttaaagttaagaattctttaaaagatgaaaatactgaagaaactaatataaaaaagtcttccagagttaagggtataagttctgatgtaacaaaagtgatacttacagaggcagcaacaaaggaacttttaggagaagtagaaagtaaagaatagaatgaattaattttatataaaatatagggaatctagtttgaaactaaaatagattccctatgtactactttaagtttttaaaaatacagtcaataaactccataactaaatcttcagtttgatgatctttatccaaagctggattaaattcaacaagatccatggacttaacaagaccgcttttaacaagagattctaccattagtttagtatcgtctacatttagaccatcagaaaccggtgttcctgttcctggtactatggtttcatcaagacaatctatatcaaaacttagatgaactgaattgatattattttttgaaagcttttcggtaatctctttgagaatatactcaacacctaatctctttacggtttttgttgaatagaaggtaaggtttttttcataaattagagctaattcacccttatcaattgatcttgctcctattatgaacacattttctggtttcactttttgaccgttatagcatatgtttgtaagttcgcttgcaccaatacccattgcagcagataaaggcattccgtgaacattacctgtttctgtggttttgtctgtgtttatatctgtgtgagcgtcaatccatattactgcaaggttatcaagagctttacttgcacccgttatgctgccaagaccgagtgaatggtcacctcctactacaaatggaaagtttccggaggatagtgattcataaaccttgtttgcgagttctgtattcgcttcaactatgggctttaaaaatttcattttatcattgaatttaaatttatccttttcggatataaatggtacattaacatcgcccatatctttaacattgtgattgtacttggctataagtgacgctaaatttttttctctcaacttgctgggacctaaatctactccttttctatcagaaccatagtagataggtacgcctaatatatcaatgttcatctgccatacctccaagttataaataataatacgaacttattatataataaatatgaaaaatataaagtagtagaagtataaacgcaatattaagaaaattctacaaacttactaatctataaagaaactaatataaattttaacattatagttatgtatgataatataatgatattaatattaaatttaaccaaaaaacttataaatattaaaaaaaatttttttgaggtgaaatatgaataataaagaaattttagaattcatggttgatgaaggaataagtaatttagaagagataaactatagtaatgatatttttataataaaatttcattacaacttcgatgaatatgaaataaaagcagccagagcttttgcagatggtgagtgcaacaaaaatgaaaatagaggtgattggtacagcaaatactatcttcctttcttaaatgatatagcaagggataatgttgaagcaatggtggatgattgtatggatgaattctcattaaaggcagaatgcttaattcatgacattaaagatgaagaagcaggttatagtgaagccattgctgcattttcagaggtaggtaatagctttgacatagaaactgtagcaaaagctataaacttctaaattataaggctgtgttttattatgtataaaacacagctatagggatttaaactgtatctagagtttaaattataaaaaatatgaatattggtagctaattaaagaaaataatagataattaaaggtaatttgataatatggcaaagttgtacaaaaaaagcacttgaaaatattaaatatagtgatataatattattcgttggttgtgttcagcgagtcaacgtaacaataaggccctatggtcaagcggttaagacatcgccctctcaaggcggaatcacgggttcgattcccgttggggctaccaaagctttaaaatagcaagtttacagtattgtagacttgctattttttattttaaagcatttttcgcaaaaatattacattataggctatagccttcaaactaagcaagataataatatgaaatatagaacataataaaaggtaattaaatctaaaaagcgaaacttaaaattaagtggctaatgccatatttaaatcatcaaatagatatgtatgtaaaagagcttgccaattacaatgattcaggaataagaacagagaaaactgtaattggagttactacaaagtgtcagtacagtgaaatcattagtaaaacttgatccgtagacgtattaaaataataatttttaagttattttaatacatctacggattttagttttactgatttcattgaatggtgacaaggtaacttacgaaacggatggaacaaatcaaatatattacagttacgatagcactggtaaattattaagtatgaatttaaatggtactgaatactactatatcaaaaatgctcaagatgatataataggcttaattgacaaagcagggacacaggttacaagttatacttacgatacctatggaaaagtaatatcaatagatggaagcttaaaagatactgcacacaaaataaatccatatagatatagagaatataggtatgacagcgaaactggattatactacttacaaagcagatattataatgctgagtggggtaggtttgttaatgctgatgttataacggctgtaacaggagatatattatcaactaatatgtatgcatattgtaaaaataattttataaatatgagtgatgttaatggtgatttctcaatggcaaatattggagcaatgattggaacaatgattggaacaatgatggtagatggaattagatcaatgatgtcatcaataacaggcaaaataaacaaagctatagataaacatccgtataaaacaacagtgatacaatcaacagtagatgtaacagcaggatataaatacaataagattagaacatcaagagtttttaaaacggtaagaccagtagaattaacggtatatgaagaattaccatttaacaaagttctaaagtttatgggaaacaaagtaggaatgctatcggcagggcttactgtacgttcactaatattagattatgaaaggaattctggacaaaaggttgtcacggcaatgcttatagatattggtggatttgcagctacatattatgcgggagatttaattggtagagctacgactccattaattgaagtcaatcctcctgctggaattgcagctacagtagttttagttggagcttcatcggttgggataggtatttttacctcaaaggcaaaggaatattttagcgttaattaaattatatagggtgatgaaggatgaaaaaattattagaaaattataaagtcatgatttcattgatatcgataagtctttttatactagttaaaaatactggacaagctaattttgaaaacttttatttactatatgtagttatctcaatacctattacgatttttgtaggaattaaatatagaaatatttatgctaccatgctttttacattaatgggaccattactaggtataagtggtctaggaatgtgtcatttcaaatccgatagggagagtttagctatgggtggtttatttataatgacatttattttgggtgatatagtaaattatgaaagaataaaaaaactaggaaataaaaaggagattgaagaaacgcgtaaaggtatgagtcatagaataatagttttgtcattaatacttataggactgttttatgcagtatttatatataaaccatagcatttagagagaatgttatattaatatctaagtctatattatattaaaaaaatgtatgataaaaaaagaactaggttttataacttgtaataattaaaagtgtatttaaagagtgctcatagtgagaaattatagctatgagcacttaaacttataaagtaatatcaatagatggaagcttaaatgatactcaacacaaaacaaatacatatagaatataggtatgacaacaaaacttaattatattacttgcaaagcagatattaatattataatgctgaatggggtaggttcgttaatgaagatggaataagtcttggtatatcagctcaaatagtgagggatttacatagtaaaataggtttagctgttacactatccattggtgttggtactgtagcggcaggaccagcaggtaatatatcaataactaatgctaattctatatttgatttgagaggttggggaaaagaatttggaggatcatttaataaatttggaccaaagctttattcactagaggtagaagttcatatggattttacttatacatggatattaatacataattaaaagaaaagtgataattaagtagtggaggcgattggtaaatgagtatttcaaatacaagggtagatgaatttacaaaaataaccttaataatagatatatttatcattattttaaccataattttaagttttatttttaatgctgatggaatgtacatattaagaataggaggggggtggatgttcatagctaattggatttatcttatgaaaaacaggaaaaaaataagagaaatttgttgtgaatattatggtaaagagcatgtgaaatttcaatttgtaaaatctatgattttaatacagtttatgtttcttataggtatatttataataagtacagtatttatacgcttctaaattatatattctaagaaatttataacttaatttgttgttttgaatgaaaaccaacagctaagtaaaattgtaagataaaagtagacattggacttaattaccaattatctactttttttagttgacgcccatgctgggcacacttaaatataagttcaaacttaaaatagaaagttggagcttataatatttttgccgcacttttcccacacaagttttaaataagtataaaaatgtataaaaatatataaaagcttatatgttataaaacctcatatgggggaaattctataaagaatataaaaatttataaaaatcattgcacagaatcaagggttcgattcccgcccgagctaccaaagctttaaaatagcgagtttgaagtattgtagacttgctatttttttatttccaagttattttaatacatctacggattttagttttactgatttcattgaatagtgacaaggtaacttacgaaacagatggaacaaatcaaatatattacacttacgatagtgatggtaaattactaagcatgaacttaaatgacactgaatactactatatcaaaaatgctcaagatgatataataggcttaattgataaagtaggaacacaggttacaagttatacttacgatacctatggaaaagtaatatcaatagatggaagcttaaaagatactgcacacaaaataaatacatatagatatagagaatataggtatgacagtgagactggattataattcatttgtgcattgtaataataatcctgtaaataaggttgatagcgatggaagatttgcagctgtggcaggttctgtgtattttgttccaggagttgtagaagttgcgattattgtaactgtaggggctataggcgtatatggtgtttataaagctgttagttgggcttataaaaaattacgtatgctagaactaatggtaatatcaattaaatttatcaataggaagggctaataggaaaaaacaagggcgagaagtaaatacaaaaagtagaaaaaaaccaaagattaaatctagaagtaataaggatccaaatagactaataaacccacacacatcagcaaaagtgcatagaaaaaattttaataattggataattgggagtaatggaatgaatagcgatggattgagaatcagatgtgaaaaagatatagatttaaaactaagagatgtaattattgagttcacaaggtggcttaggagtaaatatgtattccccataaaagttactgtttttataaaaaataaatataaaagcaaatcaaatgataaggagcgtttttcttcatcgtttgttataccgaataaagaaagaggaaatccacatataagaatagaagttaaaaatgatatgtatgataccatcgaacttagagaatatgtagtatattctatagcgtatgaagtaatgatttatatgcagtggattaaaaaattagaattttgtgatagagatgctgaaaagcaggcaaataagttagtggacttatttatagaagaaagaggagatgatttaacagtaacgaataaagagaagaaaatgttagaattagctgataaaaagttcaacaataaggattttgacaaagctatttcaatttataaagaaatgataaaaaatgattactactacagtggatgggtatatagttctattgcatattgttatgattgtttagagaattataatgaggcattagtatattatgataaagcattaaaaaataacaaagatagtgtaatttatatgaacaaaggctttgcactacaatcgcttgaaaaacataaagaagcaatagaaaattttgataaatcaattaaaattaaacccagcaaagaagcttatgtatttaaagcagattcacaaggaagacttaaaaaattcaaacaagctatagaatgttgtaatgaagctttgaagttagatgaaaattatgatataccatataatatgaaaggtcaatttttatatgaaatagaagaatttaaagaagctaaaaagatgtttttaaaagcaatctccattagtgctgattatgctgatgcttactataatttagcattagtatatatgaaattagatgattttaaattgtcaattaaatatcttaataaggcaataaaattagatgaagagtatagaagatatgcagaagaagaagaaagggcttggaggaattatattaaataacttacttcaaattaaggtatatgatattggattaatctttggttattttatgaaaggaaaagtataatgaagaaaatattctagaaaatgatgaatttaatgagttttcaatatatggtagtaaaatatttattagaattgctggttggctatatttatttgacatgaaatctaataaacgaggatgtagataattgcaaagtaattaatagaaatatattttatacagattatgatcaaagaacacaaactatatataaaacaaatttacagcatatgaaaactgaattaactaagaaggatattaatatgaaataaaagataagataaggtaaggaggagttattggtatagaagttgtgtataccgtacaaaaacattagtggatatagaaaaaatttttgaagaaggcgaagaatattatgttaatggggattataataaagcattagaatattttcaaaacggatataaaataagcaaaaatgaagattttttgaattacattggatgttgctatttaaacttaaataaatttgaagaggctatttcaacatttgaagaattaatgcaagtatatccagagtgggaaagacctgtatttaatctaggaagagtttatttgaagttagaactttaccaagaggcactagattattttaataaggcattggtaattaatccagatgatgaagatgtatatttttactttggtatttattttgaaaagaaaagagattataaaaacgctatttgttgtcagaaaaaatctctacgcttaaataaatttcaaccagaaacacatttgcatcttggtttatgttatcttagaacaaataaatataatgaagcaattgtagagtttgatatgtgttgtaaacaagataataattgtgaagacgcaatatataataaagctataacattattttgtatgggaaggtatatgcaatcattatatacatcattagacttatataaagccaatcctaatgatgttgaaaatatattaaatataggagagtgttattacagattaggtaacttgagttatgcagaaaatcattttaacgaagtgttaaaaatagattctttgaataaagtggcaagtggatttttgaaaaaaatacataataaaaaagaatgaagaactaaggtttataatttgtaataattataaagggtgctcatagtgagaaattatagctatgagcacttaaacctataaagtaatattagtagatgtaagtttaaaggatactgcacacaaaataaatcaatataggtagttatggaagaaggttactatccccactttcatattaatggagggcatggtgatccgcatatatggtttttcctgtaccttaaaattcttaagaatgtaacagcattgtcccaggttaatttatatcatatatgataggggagttaaaatgtataaaatactaatagaggaagagttgaatttaaaggcatatgaagggataattaattttgcagtttctaaatctgatgcatgtatgctggtaatatataggtacggtgaagaagaaaaaatatctaatcctccaagaaggaatgattataataatgaagaagattatttaatgtttttaaattgtcttgaacgaatgaaaaaagaacgatatgacaatttagatatttttaaaaaaagtactgaaccattgctggaaaaaataagaccatatctaattaaaaagagaaattttccaacagaatggcccggtgtaaaggttgtattttatagtaaatatacaagtgttgatatttgtgtttacagtatatgtaaagaactagaaacatatttgttagaagcaaaaggattatttaactggaaatatccatattttcctgatgatttatgtttttttaaaaatggatactgttggtttagtgtagttgcgcatgaagaatatgcttgtatttatattgaagatgctcaagatatagaaaaactattaaaaataggtgtaaaatttaaagttactgaatgcaataaagatgaagttaagttattttatgaagattatagtatataaaatatagttttgaggaaatggttaacaataaagtggtagcagaaagtgaatattcagaatgtctaaaggaagcagactagaattaataaaaaattaaagataaatctataaagtatataaattatcataattaaacagctagaaaacgtgcgtagttttatgcaaataaagctatgtgcgtttttttttataggatttttaagatatgaggttttatatggaaagatttttgaagaattatagtccaagtagtttgttcgtattaatttgttatatagaatttgtaatagttagatgtgtattttaggagtgcatattctgagtttccccacataattatttgtaactttattaacatactgaaataggaaatacattcatgtgggttacagtacaaaatgataagcttgcattttaatataacgagaaatgtattatgaaagatgtgacaaagaaagggcttaaaattactaaagaactatatagttttcaatttataatgatgattttagcaatattaataatgtttgcatatgtatttattggcttaatatataatattatggtggttctagaatggctgtaggaaaagcagaaaaacaaattagaaaattagaagataagatattacaagtagaaaagaaaatcaaaaggctaagaaataagattgtaatgttagaaaacttctcaaaaaaattttttgtgactatttaatgcaaatttcgacatataaaatatggtacaatttgactctatgaataaagtattaataaactattaactaaaacagatagttatggtaagtataaagaagattcaaattaaggtatacgatattggcttaatctgtagttattttatgaaaggaaaagtataatgatggtcattatacaaggtaagcaaatgaagaaaatagttttaattttaatttgtatatttacattcagtttagttgggtgtaataaaaaagttaatgatacaagggtggcagtgcataagaaggttaaattagattatccaatacatcttagtgataaagtgttagataatacttcagatattattgaggatgataattttatttattactctgataaaaagggaataaataagctcaataagaaaagtggggaaagtaaattaattttaaaacagaaaaatgttaatcagttagtattagttgaggaaaatatatatttttcaacagtggatgaaaagaactttggaatattctgtattgataaaaatggaagtgaactttctaaaataatagatggtaagaatatggaatacgctaatcaatttagatattttatgatacgagataataatatatattttcaggtgactatgtcattatatttgtttgatatgacgtctaaaaaattaaagcttttaaataatgatgcagaacagtttaaggtaaataaaggcagtgtgttttatatagatcatgggcaaagaacatttaccatttacaaagaaaatatagacgatatgaaaccacaaattatcttaggtaaaggagtatcagaacctaaaagagatatatattacggatttgcatttatagacgatgatttgtattttcttaaacgtataccaaatagttctgataatcactacactacagcactatttacttataagaatggaaatgaaacaattataatgaaaaacgacaacgaggttataggtgaagatatggtagagtataaaggagatttatattttacgacttatagttctgatgaaaaaatcaagcttttaaaatattctgctaaggataatactatatcgcaagtagactgcagggattcgtctaaagtagataattattttgtttggaacacagtaaagataattaatggttatttatattatccaacaaaagatgataaacttagatgtgttaaattaaagtaaatatcctgtggtattaaaataatatgtgtaaaataaaaaagaactaggttttataacttataataattaaaggtgtatttaaagggtgctcatagtaagaaattatagctgtgagcacttaaacttataaagtaatcttcaaaagattgttttgattgcaggtacagcagcaattataatagcaacaatagtgaggatatagagttacagggggagatgatccttaaacgatttctgttgaagcagttttaattgtaagggcttttgcagaataaattaaaggaggacaaatatatgacgtttgataaattgtataaaaaagctgagggttattacatgtcagaggattacgaaaaggcattaaagttatttaaagaatgttatgaattagaattagataataattctttaaattatataggttgttgttatttagaaacaaatcaatttgaatctgcaatttctacatttagtgaattaataaatgattaccccgagtgggaaagaccagtattgaatttaggaagagtatttataaaaaagcaaatgttttcagaagcattagaatgttttcaaaaagctttgaagataaatccaaatgaagaagaaacatatttttatttaggaatatactattttactatgaagaatttcaataaagcaacagaattttataaaaaagctttagaaataaataattctataccagaagtacacttgaatcttggaatatgttattcaaaaatagggttagatgaaatggctattgatgaatttgatgatgcatttaggcttgataatagtagtgtagatgcactattcaataaagctatggtatttatttttatgaaagattacaataaggcaattgaaatgtttttatgtataaataaaatggaacctgaaaaaattgaaaatataatatatattgcagaattatatttgataattaaagatttagataacgcatcaaaatggattaatgaaattttaattaaagatcccaaaaatataactgctaataaactgttaaagattttgttagcattaaaaaataaagaataatatatcatcaaataataattaaaggtgtatttaaagggtgctattataataaataaatattttgaaactaatctaaaagagaaaaattcaattgagaaaataaatatgcttgaagaattagaggatatgaattgttttacaaaagatatgtataagtttttagattatctttccgaagatgaagaatatgaagtaagggtaaaagtttctgaaatattagttttgtcaaatgatgtagagggagataatatactaataaagctgctaaaagataaagaagaattagtaagagttaatgcatgcgattctctttgtaatagctcttcaaatgatgttatttatcatctgaaagatagaattctaaaagacaaaagtagtttggtaaaaggataggctatattatccttagtagatatttttgttacactaaataataatttaagcgaacatattgagttccttaaacatatactaaaaaaacaaaatactcaatgggttaggattaatatatataaagctttatatatattaggagacaaagcctacttaaatacactggtaagcgaattagaaaatagatattatagaaatagatgtgcggttgtaaatatactaggtgaattaatttcaaatgaaagtcgtgaaataatagaaagagcattaattaaaagattaaaaatagaaaaatcttttgcagtaaaaagtggaatagagaaactacttgattatacaattttataattaaatatttaagaaacgttcttagcttcgtgtaaatgaatctatgcgtgtttttttataaaaatttattttacccattacaaattataagaatatatagaaggcttataatttgtaagaattaaaattttgttagtattttttgaagtatatcagagacattttcttttgtcatcatcattccgttgtttaaccaatcttctataactccaataacacctgaaacaataaaagtagcttcaactacatcataatcaatattattatttataggtctagagagtactatgctctcatgcaaaactttattatagaaatagctttttagtttagaaaacagatttccttcaagttcaaaacgagtaaaggtttggaatatatcactgtgtattgatatatagtccataatattattgattaaatgcataaggttgttttcattaatatatggattggacttttcaaataactcacaaatttcagtgtacagttcgttttcaagagtattatataaatcataagtgtctttataatgcaaataaaaagttcctcttccaaggtcagccattctttaaatttcagatacgcttattttgttaagagatttttcttttaaaagcgttaaaaatgccttgcgaatagcatgttctgtttttacaaatcgtctatctttcataattcctccaaaaataatacaaatatttattaagtgttcattaatgtacaaagttagaataattgcagattgtattaatatatgtatcaaattatttaaagaaagcagtttattaaatgttttacgcttttttaaatttttaggtgatgctgaaaaatcatgtaaaagtttaaataaacctgtatggtatcttgaatcattagctgttgataatttatatcaaggtcaaagtcttggaagcaaaatgataaatgattgccttatacattgtatagctagtcatggtggagaagaggttgctttaattactaattctgaaataaacctcaagttctatacaaaaaatggatttaaagaatttaacaacacgactatatactttaaaaatagcggtattagtaattggagttattacaagaagttatagaaaaaacagtaataagagattaaataaaaaagataataagtaaagaatataactttattttatttaaggatggacttataaacatttctttacagaacctaaatttaagaaacgtgcgtagttttgtttaaattaatctatgcgcgttttttataatttcaataattccctcttatggtaatattgtaaaatacatcacatagatgtataattaatacaaattttatatatttaggaggaagcgcatgaaaaaacatatagcgttaatttttacacccataaacaaaaaatataaggatgcattaacacactatgcaccgccattaggattagttgctcttgcaaattatatatctgaaagattgcaaaatgtgagaatatcaattcttgatgggagtgttacccactcgatggaggacattataaaatttatagaggatgaaaaaccagatatagttgctcaaagtgtacaacttatatcttatgaaaattccctggtaattgcgaaaagtgctcataacattggctctataaatgttcttggtggacagcatgcgacccaaatggcagatgcaataatttttagacagcaaggattaattgattatgtaagtattgaggatggagaggagtctttactaggactattagaagaaagagatattagcgaaattcctaatttggtttttatgaaagacggaaaaattaataggacaaaatactttcaactagatttaaaaaatgcaccaaaattagattattccatcgtagattttaaaccatatcaaaaattgcttaatgaaagtaactttacaaaccctaaccctataaataattatcttcgtgtttattcacataaaggatgcggcaatcgtaaaaatagtgtgggctgcgtattttgtggaagagcagacaaaggagtaagatttaaaagtccagagaaattttgggaagacattaaaatatgtgcagatgagtttaaagcagactatatatttgatgtaggagatgattttttatataaccatgattgggtctcaaaagtggctgaaataaagcctgatatacgaaaaaagtttgaattaggtatattcgcaagggctaatagagttaatttatcaatagcaaaaaaacttaaaaagattggagtaactgatgttgttattggattcgaatccggtgatgaagaggtattgcgtcgttgtaataaacgagatacatctactgaaactagtttaattgcagcagatgcattagctacagcaggaattgatataacagcaagttttgtattgggtttacctggagaaaattcagaatcattaaagaaaacaattaagtgtgctgaaaaggttgtaaacataataacggaaaaattggggagaccgcctagagaaatggttgggaatcttatagagcctagtcctggttctatagcttataatcaattattaaaagcatatcctggtaagtactatttaaatgattatgtaccattggatgaaatgcaaagggattactttaaatattattttggtttggattcgttgaaatcatatttagagtttaggaaagaattaaataaggcagcacaagaaatacatggtcttgttagcttttccgattcccaaggatggcttgaggatgaatttgtataaaatttaggagagtggagagagaatatatgagtgatttatcatatgattacagagaaaaaaagatagtagttacacttgcagtaaatattccgctagaggtagcttttaatgtaataggacatcttgggatttctattggattttatgcaaatgataattttatgggaaagtcgcatattatggataagtcgggaaaacctcatataggaatatcaaaatatcctgttattattactcaggcaaagcaacaaaagttacgaaaagcaataaatgaagcaagggaaagtaatgatattttgatggtggattttccaagacaaatgttaattactgaacatgatgatgaattagtaaaatcattaggcgagtctttggaagaagatttagaatacttaggtgcaatattttatggaaaaagcaaatatgtcgatagcataactggcaagttttcgctgtggaggagtaataatgtcaaagtcaactaaagtggatttagtatttctattttttactgcaatatggggattatcatttccgttaacgaagaatgtacttggctatacatcaatctttgcttttttatcattaaggttcacatcggctgccgtaattttaataattattttttggaagaaattaaagcttatcaatactaaaataatattgtatggttcattaatagggctaatgttttttggatcattagcatttcaagtagcaagccttagattcacaacatcatcaaattcatcctttatatcagctttaagtgttgtaattgttccgttagtatcagctggatattataaaaaaaagatagatttttcttgtgtattaggagtattatttgctgttgttgggcttttctttatttctggtggggtgaactttaagctgaatataggtgatttgttttcgtttttatgtgcaatatgtattacttttcagataatatttattgacatattttgctctaagtgtgattctgctttactatccttaattcaagttgtgttttgtgctatattttataatatagtattatttataataggaacgaaacctatagtatttaatactcaactgactgtgagcatattcataactggaatattgggaacagcggttgcatatactggaatcgtgtttttagagaaatttacatcgcctactcatacggcattaatattttgtgcagaacccgtatttgcaacaatatttgcaatgtttatacccaataataatggttcctgtgagtcaattacaataaatacctttatagggtgtggagttattttgttatcaatggtgatatctgaacttaaaattggaaacaatattcctcaaaaaattataaagttatagtaatattgtacttcaatttatatttacactaatcataaaagagcaccgcgggtgatttttcatcattttgcggtgctctagtattatgtttatggatgtgctggtgttataggaagccttggtgtaacctgatttttagtaagtccgtagcctgaatcaaatagcatatattgtttattactatttgttatagggtatgcttctgtataaaaagcccatttttctggaagccttcctgtgaagtccttatttccaaatagaacatcagaaactccattaccctctgttccaggaagccatgcctcgactaagcctgcccagtcctttatataatcagtaactatcattggtcttcctgatacaagtacaacaatagtaggtacacctgaagcttttagatttgcaagagtttttttgtcagttgaatctaaatttaatccattaagattatcgccattagtttctgcataaggagtttctcctattatagctatagctacatcatttccggaagctccagcaccatcctcgctgaaagtaacattttgttttggactgattgaatctttgataccttgaagtatggttgttcctttggttgtattaccactctttccttgccagtctatagtccatccaccgcactgattgcctatatcgttagcactttttccagcaacaaagatttttttcattttcttaagctgagaaagaattggttttccacctacagcatcattttttaacagtacaagagacttacttacagcctctcttgctaattttctatgtttgtttgaacctagttgtgccattacctttggattattttcagggttattagaaataggatgttcgaataaccctgattggaattttactctcaatattcttgatacagcatcgttaattctagacattggtattccagtaccaggatgcgctttttcatctgcaacaagttctttaatgtagccaatacagcttttccaatcgttaggttccataagcatatctacaccagcatttatagaaactttaacttgatttttaagtccacttacactgttaccgttttcatccgcggtgatttgttgagctgcattgtaatcggaaatgacaaaaccatcaaattttagtttgttctttaatatatcagttaaaaggtatttgcttgcagtcattttaactccctgtatgctgttgtaagaaggcataacagttcttgcgcctgcccttactgcatcttcataaggttttataagatttttagcaacctgctcctttgtcattgaggtcacatttccttgattagtgccgttttctgtgtaaccttctccaagataatgttttatagtggcaacagccttgttaggcttttttaaatcattaatgtcattaccttgaagtccctttatataggagctaccaagttcagaggctagatttatgtcttctccaaagccttcataagttcttccccaagtaggattttgtggattagcaaggcaaggagcaaaggtccaaggaatgtcagtaaccctcatttcttttgcggtagcagagccaatttttcttacaatttttttaccctcattaagattacctgttgcaatagcgccaagagcaatgttgtgtggaaatatggttgctccaattatgttactgttaccatgtactgcatcgactccatagagtataggtatatgaagtctgttttgtgttgatgcttcaacaaagctagttacagtgtcataccagctttgagcatcatttcctgtagttgggtctgcattaccgccgcttaatactgaacctaaagtataattgatacagtcctctggttttgcgttatcagaagaggttcctagttctccttgaagcatttggccaactttttcatctaatgtcattcgttttaataaatctgaaactctagcttcagtgtttgcattaggatttaaataaacaggttttctggcattctctgcttttataggctttgatgatgttagatttatagttgtagagacaagaaatgtagaacttaccaaaacagctaaatttctttttagatttttattcattaatttttcccccttaaatagaataaaaaagtaaatgaaaacatttacaactttggatgtatatattatatctttatgcattgtaatattcaaccatttaatcaaaaaaattcataaaagtaaatatatttttataaagtgataagataaattgcaattggaggtggattggaatatcgaatagtaatttgaaaattaggctatgttaaagaacagtcttgggaattggttacttgttgtaaaaaaggttataatatggttatataaataattatggaggtcatattatgccaaatgtagagtcagtaaaaagagatattcaggctttaggaaaatcaggacaggaagcaatcttttgtacagattcacataagagttatattcagttcgcataaaatttaggtattgaattgcaacaaatcaagcgtggtaatcataaggaaggtatatatcatattcaacacattaatgcatttcatagtaaactaaataaatggatggatagttttaatggtgttgcaactaaatatcttgctaactatatatactggtttaaatggttggaagtctttaatacagagaaagatactgttaagagtaaaaatctgttggtacaatctcatacttgtcattctgacacaaaattaaaagactttagatttagagaagcaatttatatatagttatgcaaataattaaatatttgtggctatatagtatataattaaacaaatggataattgtaagatatagtgagtgataaataggaatttgtaacgaaaatataatacaaggagaatgtagaatgagagaaattataagaacagaaatagacaaagaatgggcacactctgcgattgttgaggcaggtgattatgtttatatcagctattgcatgaagaatgagggacaatcaatcgaaaaccaaataaatggtgcatttgatgttttgagtgaaagacttgaaaagataggcttgacattgaaatctgtagtacaaatggattgcttatttagagatattaaagatttatcgtttttaggagaaataattaaggaaagatttgaaggaaaatatccagcaagaaaggcatatgaaacaaagtttattagagatggaattgcctttcaggttgatgcaatagctttcagagagaattaaatagattccaatttataagcgagattagatgaataactttaatgaattattatatactatgctatcaacactgttcattaacatagccaaaaattaaaatgtatgtatatgaaaatataagctccaacttaaaataaaaagctggagtttatatttttacttatattaaaaatcaatagtgtaggtattcattgttttacaagtaccatttgcttgatacttaacgcctgttactacgatgccatcactaaatactgtaacatgatatccttcaggaccattgctatcgacttcaccagttgaaggcacgctgaagatatgagctgatgaatctccatttagagcatacccattacctgaattccaaggatcattattatcaaattgtttgtgagtatggcctgtaaacattacaatttcattgtgaccattgagtaaatttttaatattgtagctagcatccttgtttatatagccccaatcatcacgatcagatccataaactgtgctatatacgggttgatgagagaaaataaacataggctttttaccttttgatgtttgctttccttcatttgaattatcattaatagcttggctcaaccaacctaattgactactgccgatagtggaagtgtctggagcatctgatggtaattcgtcagtacctaagaaaaagagtctgctatttttgttattaatatattgtaaatcatatgagttattgcgtcctgtggttgttatgcctacagcattacttagtagagagctttgaattgcatttgttttggtgttaaagaagttaagtgcatcagtataattccattctgtattaggactactttgagttttgaattcatgattgccgatgttaaagtatacatagggaagattagaatctttacagcctagtatagtatcacttagctccttataattttgatctgaagcatagtcaactatgtcgccatctactactatgcactgatcatttaaataatttttataaagagggctattaggattgctttttgcagctttaatactattttttatacaggttaatgcatctgttaaatgattacaagcaccccaagatgaatcggctcctatatgagtatcagaaataacgtcgaaagaatattgggcatttacggtaatagaagttgcacaaataattcccatagtgcaaatagttgcagttaaagtttttaatagcttcttactttttttcataaacagcctcctaattataatgaaattattttacaaaaagttaacttaatatttaaagaatacaataaaaattaaaaaatgtcaaatagttacataagtgttaaagatattaattgttgattcatttagatttaagtaaaaaataagaactgcatggacaaaaaagtcgcatacagttctgcatatataattattaaatatttttaacctcagtagcagtaccattgtcatttattttataggttataccgtctacgataattttagtatctttttcaaggtatccgtctgaagaaaaataataaatacttccatcaattgttttaagtcctttaggagccaatccattagaatcaaaataataggttttagaatcgatattttgccagccctttaataaaaatcctaaagagttaaatccataagtaccaccgtcaattgaaacaactccagtctgcataacaccatcttggtcaaagtaatatgtgcagccagtaatagttttaaatccagttatcatgtaagcgtattgagggtcgaaatagtactttttgccgcggtagttaagccagccatttttagcgattccgttaggtgcaaagtagtaggttttagaattaatagtttgccatccagtaagcatgatgccgttagagtcaaagccgtagattgaatcatttatagtattaactccagtttgcataacgccatcattattaaagtaatagttacatccacttaagttctgccatccagtttgcataataccattttgatcaaagtaatatttgttattgctaaaagtaattaagccggtttgcataactccattttcattaaaataatatttatttccatttacatcttttaaaccagtaagcatcatgccgttagaatcaaaataatgttgagaggaagaagaatccttaaaccacccagtaaacatggtaccatcagagttaaagtagtaagtttgatcatttaatttttgtataccagtaagcataataccatcttggccaaagccgtaataggtgccatttataggaacgattccagtttgcataacaccactagaatttaagtagtacttgttattatccaaagttaagaagccagtttgaactacaccattagagtcaagataatatttattagagttagcagtaatccagccgcttaaaatagctccatcagtgtcaaagtaataagttttgtcatcaatagtttgaaagcctgttaatttgtagcctaaagaaggactgaaataataggttttatcagaaagtttagtccagccagtagaggcacttccgtcttggttaaagttataagtgtgattgtctatatcttgcacaccagtgagcataacaccgtaattatcaaaaccgtaaaatttatttcctatagtttgcacaccagtaagcataataccgtttgaattaaaataatatttttttccatcaattatttgaaagccaataagtctaattcctgtggaatcaaaataatatttattgtagtcaatagtaatccacaaggtttgcattataccatcatcattaaagtagtaaacattgttattgatagtagtaaaaccagtctgcattacgccattagtatcaaaataatatttattattatttagagttaagaagccagtttgccttacaccattagagtttagataatacttatttccatcaactgtgacccaaccagtttgcagtacgccatcagcgtcaagataatagttatcccctgaaacagtaataaaaccagttaatttgtaacctaaggaaggactaaaatagtaagttttatttgaaagtattacccaaccagtagtagcagtaccattggaactaaagtcataagtatttcccgctatagtttgcacgccagtaagcattattccattagaatcaaaaccataaatatatccggtaatattttgagctccagtaagcataacgccatctgaattgaagtagtatctgtttgaattaattgtctgccaacctgtgtatgtacagccataaatgtttaaataataagtattcccatttatagactgaaatccattcatagcagtaccgtcattgttaaagcaataaacatagccattaattcgctgaactccagtttgcataataccattattgttaaagtagtaataatgtccatttatagattctataccaacttctgcggcaccataagaattaggattaaaataatatttatttgaacctaaagtagtccagccagttattgcagtaccattgctattgaagtagtaggtgtttccattcaatttttgcaatccgatttgcataacaccattatcatcaaagccatagtagtttccattcagagaaattacaccagtttgcataataccgctataattagggttaaagtagtaggttttaccatcgatgattttatagcctgtttctctaataccatatgaatttatatagtacttagaattgtctacggttataatacctgtttccatggcaccattattatcaaaataataagtgttgttatttatagttgcaaagccagtacagtaagaaggatttgcatagtacatttttccttcataaggaatccatccagttttaacgctgccatcagcattgaaatagtaagtttgtccatttatgctatgaactccaaatagcataccgccgtcattatcgaagccgtagtagttattgttaattgattgaataccattcatcataataccactgtaattgaataagtaatttttaccatcgatagttttaagtcctgtttgtataattccattgttatcagcgtaataaatataattatttctaatccatcctgtttttagtgcaccatcataaccaaagtaataagtattactgtttatattaataattccagtttgagtgtaacctccagtggaaaaataatatgttttaccttcataggtatttaaaccaattttagccgtgccatcagggttaaaataataattattgccactaatagtctgccaaccggtaagcataataccatcatcattgaagccatagcaatttccattaatagatcgtgtgccagtagtggaattaccataggaatcaaagtaataagtattaccgtcaattgtttgaaaaccagtaagcataatacctgattcattaaagtagtactttgaagagccggaggtaacccagccagttttcatagaatagtcactgccaaaatagtagatgttatgtcctatagttaaaagtcccgtacttaagaagccttgacttgaatcaaggtaacaggatcttcctaaataattaatccatcctgtttttacggttccatcggtattgaagcaatacattcttccatttatgttatgccaagagtatagtagggttccatcattgtcaaagccataataagtgttattaatgtatacgagaccagtctccatacgtgcgtaggagttaaagtagtattttttaccatcaattgtttgaaggccggttagacatactccagaagaattggcataatacctaaggttgtcctgtgaaatccagccggtctgtaaagtaccgttgtctccaaaaaagtagtagttattattaatattttgaatacctgttctcataccgtaataggaatcaaagtaataagtttttccgtttaaagtaataaaaccactttgagaaataccattggaatttagatagtaggtattaccacctatagtttgcagaccataaagcatgactccatttttatcaaagccgtagtagcttccattgatatattgaagatcataaagtaaggaaccatcactgttaaaataataagttttaccatttatggtttgaaagccagttagtagtataccatttggatttgcatagcgtagatacgaaatccaccccgtctccataatacctttgctattaaaataataatagttattattaatataggttaagccaattcgcatttctccataggaatcaaagtaataggtattacctgataatgtaacaaagccagtttgagatattccataggagttagagtagtaagtattattatttataaattgaaggccataaagcataactccattaacaccaaagccataacgatttccattgatagttataatacctgtttgcattatgccattagaatcaaaataatatgtgtttccgtcaatggtttgaagtcctgttaatttagttccggctgcgtttaaatagtactgatagtagtaggaatcacgtacccaaccaactgccaaagtattagggctatcagttgatgttttcataacgccattggcatagaaatagtagcttgtaccatttatagtcattgaacctatttgcattcttccatagctatcgaagtaataggttttacctaaataagttataaaaccagtattagcaataccgttggaattaaaataataagtacttccattaatatgctgccaacctgttagcataactccagaattattaaaaccgtagtaattaccatcaatatttacaatacctgtttttgcaccgtaatagtcaaaatagtacttattaccatcaattgtctgccatccagttaccttaatgcctgagtcgttaaggtaataacggtagtaaccataattgacccatccagtttgcatagtaccatcgtttccaaagtagtaagtgttgttatttatgttctgaaaaccagatactgaataagaatcaaaatagtaagttttgcctagataagtcactaaacctgtttttactgagccatcagaattaaaacaatacagataaccatttattaactgaaggcctgtaagcataattccgttattgtcagagccataataagtattgccaatataaaatataccattatgctgaagaataccgttagaatcaaaacaatatttattaccatttatagtctgcagtccagttacagctgcacctgagggatcaagataatattttgaagatccattagtaatccacccagtttgcatagtaccatcaggggcgaagtaataatgatttccattaatatattgatagccctgaagcatacggccatcacttggattaaaatagtaagttttgtttaaataagtaaagaaccctgttttggcagtgccatcggaattgaaataataagtgttaaaatatgaagaataaccacgattatatcgtatagtttgccatccagtaagcataataccgtctgtattaaaaccataagtgcttccattaattgtaactacgtcggtatagattgcgccgttggaatcaaagcaatacttgttaccatcaatagtttgaaagccagttacactggcaccagttgcgctaaaatagtatctattggaattataattaatccagccagtttgcattacgccttcattgtcaaaatagtaaagattattattggcattaacaaagccagtatacatatttgtattaaaataataagttttgcctaaataagtaacgaagcctttttgagctttaccagtagagtcgaaataatatatatatccatttatagaatgcataccagtaagaatatggccattgtcatcaaaaccataataatcaggatttacataaactaaaccagtttgcatgatgccgctggaattaaagtagtacttatctccattgatgttttgaaaaccagtcactgcagcaccagatggatcaagataatattttgaggagcgatcagtaacccatccagtttgaattacaccatcattgtcaaaataataatacttcccattaatatagttatatccaagtagcatatatccatagtttggttcaaagtaataggtttttcctaggtaagtaaagaagcctttctgtgcgctgccatcagaattaaaatagtagatgttataagatgaatagttactgcttaaaatagtttgccatccagtaagcataattccatctttactaaagccataagtatttccgttaactgttataaagctagtgcacattgcgccactggaatcaaagtaatatttgttcccatcaatagtttgaaagccagttactctaacaccagttgaatcaagataataacgattattggagtaattaatccaaccagttcttactactccgttgttatctaaaaagtaatagttattattaaagtatataaagcctgtatctagataggcataataagtgttaaaataatacgtttttccttcataggtaactaaaccagttttagcagctccattattatcgaaatagtaagtcctgccatttatgcgctgccatccagtttgcattatgccattatcgtcaaaaccataataatgattgtttatagatatagcaccagtttgcatattaccgttaatataatagtaagttttatcgttgtcaaaaacccaataattaatcattacaccattgccgtcaaaataataatccttaccttttatagttacccaaccagtttgtttaacgccattgtcatcaaggtaataagtattaccacttattgtttgaaatccagtttgcattataccatcaggatcaaagtaataatatttgccattgatatattggaaaccagtttgtttaacattatttatatagaagtagtatttctcgtcattaataacccaattttcagtcatgatgctgttgctattaaagtaaaagtcttttccatcaatattaacccatcccatttggctaataccgttagaatcaaaatagtaggtattgccctttatagtttgaagaccagtaagtaatttaccatcgttatcaaaaccgtaatactgataatggtaattataaggagaagtagaataagaataaatctttaaatctgtttgcatactgccgtctgaattaaagtaatatttgttattttggtaggttatccaacctatttgtctaattccattatcaccaaagtaataagtttttccatctattttttgaagaccagtttgcataataccagaggaatcaaaataatagtagttaccatcaatattttgaagaccagtttgtttaacaccgcttatatagaagtaatatttaccatcataatttatccagttatcagtcagtattccatcttgattaaagtagtagtcctttccatcaatagtaatccagcggcttacaagtctaattccgttagtatcaaaataatagctattgccattaataacctgaagaccagttagtagtttaccgtcatttgcaaaaccatagtaataaccgctaatataaattattccagtttgcataacaccgttaacagaaaaatagtatttgcttccgtcaatagtaatccaatcagtttgcataacaccgttactatcaaaatagtatgtataattattaatgttttgaagaccagttagcaatttaccatcatttccaaatccataatatttattattgatatgaactaatccggtttgcataacgccattattatcaaagtagtacttgctatcattacaggtaatccagccggtttgcataacaccgtcattattaaaatagtaataattgttattaatggcttgaaggccagttaataatttgccgtcatcattgaaaccataataggtgccattaatgttttgaaggccagttagcataaccccagaggcatcgaaatagtagctattactgttatatttaagccagccggtttgcatagaaccatcatcattaaaataataaatgctcttatttattgattgaaatcccttctgctgaactccatttacatagtaatattttttaccgtccttggttacccagccgtcctggctatcattatttaaattggaagcttttttgtcagtactagtggtgtttaccttaggcgcatcattattagaactagttacctttgatgtttgagaggaatcagcagctagattgttatttgataaagctttattttttgctagtgcagaatcagattggttattaggagtatcttttataggcgcatttgctggagcttcagtggtcttaatatcagtattggagggattctcgtttttagaagtattggtagaagtattgttagaaggtatattgttatcgttagagcctttagtttgggcagaggaggtgcttttagttttagaagtgtccttaggtataatgggcgcctcattattaattgagctttcatttttgaaggtatttttattatcagtaacatttgtataaggtatggaagcttgttttttaggagtaataccttcattaggagaagaagcctggttaagttttgggttaacaagaattttagaattattagtagcttgtttgggatttgtattaggcatagaactagaagcagtgttagtttgtaccttggtatttaaattgttttttgcattgctaccgtttacatttgaagtgataggtgtaaaaacatggtttttgtttaaagaaaaattatttgaagagcttctctttgtcaaggctgaagaattttttgttagttcagaggctaaagttggagtagaaatagatcctaatatatatatacttgatagtaataatgttattttattttttaacatttataccaactcctttcaagttctattttattacatattatactaaaatatcaatgaaaacattacaatatgttgataaaaatagcatatacatatttaattaactattatggcatataaaggcaaaagatgctataatataaaatatggggggtgacaatatgagtagaattaagaatattctgctagtattttcaatatcagtaacaactagtgcggtgttattaagtaagcctgcaataaaagcttatgcggcagataacagcgtatacaaaagttcaatttcaaatagtaatgaaattaatgttaaaggcaaagaagttcaagaaaaagaggtgaatgttaataagaataacgactctaattctaaggtaagctcgtcaaatgaaaatcaagtctctaataaagaaaattcaaatcccaaggtaagttcatcaagtgaaattcaaagtattaataagaatgttaatttacaagttcagcaaaataataagtcagtattagctgcttcaaacgtagatgatgaggttaagaagattaattcaggtaatgttcaaacgtcagattatattgcaataggagaaactaaagtaaagcctgatactcttgatatcattaacaaagctatagttgatgcaagaagcgcggaaggtacagatttatctgaggtagaaatttatgacatagtatctcagacggcagaagctatacaagaggcatttcgtaacataaacgatggagtagcaaatgtttcggattatacactgcttggtgcaacttttgtaaatgatgcaaatctagattctgtaaataagtatttttatcataagagatatgctactgtaacaaaatttaaggatgtagctacaaaaacctcaaatgctcttaaaaatattaataatggtcaaggaggagaaactgattatactgccttagaagtaagcggtgttactcagccttatttggacttagttaataaaaacatagttaaagaaaaacagaacaagggtagagatttgacaataactgagatatcagattcagctgcttctactatagcaagaattaatactgcattggataatatggatgcaggagtggcaacgttagaggattatcaggctattggagctaataatgtacctcaacttcatgtagcggatgttaacagcttagcaatggatcaaaggtggggagacgtaagtgaagcaattgatggaataaacaccataatgacttatataaataatataaatagtggcgtaggaacagaagacgattacataaattcgcatgcggtagattcaaatgaaggaaatattgattatgatatccttaatgccaacattattgagaaaaaaacagccaaagggcaggatttaacaataccagaagtagctaatgtagtaaaagaggttaaaacattattggatttttataatcatgcagcagcaggacagacaaccttgcaggattataaaaatgttgatccaaatgctcaagttcaacaagatgatgtagctacattaagcgacatgctgaaaactagagattgtaaaacattgaaagcattacaggacaaaatagattcaatattaaattcacttaaaaatattaattcgggaataggaaatattgatgattacagtaagcttcaaacagaggcagttgatgcatcaaagctagaagctgtaaatgatgacattaaaaagataaaagcagataaaggtagagatttaactatacaggaaataagagattcagttaagaaaactatagattatatcaattcgacctccaatgtttcaaagggagacggaagtgttagtgattacattacaattggaattgatggagttacagagataaatatagaatttgttaatgaaagaattaaggaaagtggaataaccataactatagaaaatattaaggttgtaattgaaccaatagtacaactgtcagaggtctatgtcagaatagttactggagttggaacagtagtagactataagacacttggtattaacaatgtcaatgataacaacataatctatataaatgcagaactaaagaataaaaaggatgttaaaattcaagacatacaaacaagagttgacaataccattaacaatatagatgtaataaataagataggtgcaggtgatgcggtacttagcgactactttaatataggaattacagatgtttatcaagatattttagattatgtgaatgcagacttgaaaattcaaaattacaaagatgtagacgacataattgaaagagtagaagctaaaataagttcctatgaagctttaatgagaattaatattggggaagctgtaactgacgattttaaagctcttgggttaacagatataaatgatggactacttttatacgcaactacagatttgcaaaataagaattataagactgctgatgaagttatagctagagtacaagcacaaatagaaatttacagggcattaatgcaaattaatttaggaaaagcaactacagctgattacaatactttaggaattatagatgtaaatgacagcatacttacatatgtgaatgcagacttgcaaggcaaaaattatgtgaacgttgatgaagtaaaagcagaaattgagaagaatattcaaatatataatgcattacttaagatagattctggttcagctaccatagacgattatagaacaattggaataaccacagtaattgactacaatatctcctatgtaaatatcagaataaaaggaatgaatataccacaggtttctgatgctaaaagatttattaatataatacttaataacatgatagtatcaagcgtaagtggtacaattactgattcagcaacaggaactccacttcaaggagttgagataaggtttagaattggagaaaacaatattgcaggaaattatttctctaagaatggctcacctgttgaagcaactgtagatgctcaaggaaaatacagtattcaattacctgagggaagctatacagttgaaattaaaaaggatggatacgttactcagaactttgtaattacttcaaatggaaaggctaaaacagttctgcaaaatattcagttagtgatgcttcaatacacagtaagtggtgtagttaaagatgcacaaacagggaatccactacagggagtagcaattagatttaggattggacaagataataaatcaggagactattattcagttaatggtaatgaggttgtggtatatacagatgcacagggaaaatatactgttagcttagaggatggaacatacacagctgaagcaaaaaaagatgggtacattaatgtatatagtgtggttatttcaagtgaggccactgaaaataatatacagaatatagttatatctcaaacattatctgaaaaccaatatcgcgtagttttaacctggggagctaatcctttggatttggattcgcattttagtggtacaacaggcagcggtcagtcaataaatgtttattatcaagctccaagcgctcaagtaggagatacagtggtgtcgctagatacagatgctaagtttggttatggtccagaaacagtaacttttgttgttgattcaaagggaagctatacttactcggtgtttgattttagtgatggttcatcatcagcttcaaataagttatctttatcaggagccacagtaagggtttataagggcagcgagcaaataaaaacatatactgttcctactaatgcagaaggaattacatggaacgtatttaaggttgaaaatggacaaatagttgatgtgaacagcataacaggagatagggaatagtaaggaattaaaaatatagatatagggttattcctatatctatatttatactaaattaattagggggaaaatttatgaataatattaaaaaaactttgttaattgcatcagttctagccttggggacaaaaatgggtatggacttaaatgctgtaaaggcttatgcagcagaaaatgtttcaagtagtaaaattgtaacaagtgaaaaagcttctgagtcggggaacaatgctgttaataataatgaaataaagactccagataatagttatgaagaacaggcaaaaaatcttcaagtgcaagcagatgttaaaaaaaatgtacaaggtactgtaaataatactcaaacatcttcaaatgaaacagatgaagaaaaattaattgctagtattaatgcaggatcagaaaatttatcagattataactccttgggatttacaaacgtgaagccagataatattaaggttatggaacagcagataaagaatgctaggacaagtaaaggtgcagatttgacaaaggatgaaattggaaccactatagcaaacacttcagatagcatcaaaggcatttttgatagaatgactaagggaacagcagtagttagtgattatcaatttcttttaataacacaggtaaatagtaataatttacaagatattaattcatggttaacaggaaaaagatatgccttaataagtaaaatattaagtactgtagataaaataacaacagcggtttcaaatattaataatgccaatgaccacgaaagtgattttactgcactgcaaatttataatgtacaggaagatttagtacctttcttaaatgaaaatataagtgctgctaaaaaaaataaaggtagtgatttgagttcatccgaaattaatactgtggtaaaggattctttaagtaagcttcaagatgctttagaaagaattaatttaggtcaaggtactttggatgattatcacttcattggagcagctaatgtagatgaaaataatttagaggatgtaaatggatgggcaaacggtaaaggatggtttgaaagaaataatgcaattgaggagataaattcaattgtagagccattaagcagaataaattctggagatagtacagcagcagattatgatgccatacaagtagatggagtagatgacaacaatattgataatataaaatcggttatagctgaaaaaaagcagcttaaagggaaaaatttaaatatagcagaaataaaatccgcagtagaggagtacaaaactgtattggatttttatgacctaataaaaaaaggaactgcaaaggtatctgattataatgctattggattgacaggtgttacggaagataatgtgacagatatgaatgagctgttaaaaaatagagatataaaaacattaaataagcttcaagataatataaattctataattaaatccttaaaaaacattaatgcaggaacggatactccggatgattacacaaatttaaatattagttcagtaacacaagataatatatccttcataagagatgatataaaaactgcaaaacaagctaatggcagcgatttaaataaaggaaaaatacaggattctgttaataattctttaaagcgtctttctgcaatggacagaataaatgcaggaagtgcagccttagatgactataatttgcttgggatagagggtgttaccagtgacaatttaacctttgtaaataatcaagttaaaggaagcaattgtaaaactatagatgagctgaaaactaaagtatcagatgctttaaagctatatgattcatataacaaagtaaataatggtgatgcaacgtacgatgattatttaaagataggaattgtaataaaaattgaagaggtaacctattataatggagtatttaaaggcaaaaattactttactcttgaggagcttaaagttggaattaacatagctgttagggtgaggatttctactgaaaatataaaaaatggagtaggttctgtagaagattttacaatagcaggatatacaggagtaacagaagaaaatattaaatatataaataaagtaataattgaaggaggagatgcatcgccagaagccattagcaatataataacagaagttaacgttgaaatacaaagtttaaaaagatggagttctggacaagttactgcagaagatgttaagtctttaggattaagcatagttacagaagaaaatatttcttatatcatggatagggtggttaaaaatacatattatagcaaggttgagttgatagaagcggttgaagctataataaaggaaaaagaaatatatgaaagaatcaatttaggtcaagcaactgtagcagattatgaatatattaaggtaacaggggttacctctgttaatataacctccataaatgactatgttaaaagtggaaatttaactacaagagaagaacttcaagcaaaaattgatgtggttatagaacaaacacagtccgtagcacatacagatgttgttataggaagagttaatttaggggaagcaaatataagtgactttgagtttatgggaataactgtagttaactcatttaatatacaatatgtagatgatcatttaaaagatgataaatatacaacaatcgatgcaattaaggcagctgttacggtgtttgtaggacagtatagtatttatgaggagataaataaagggacagctactttagatatatacaattccttaggtattacaggcgtgacgacagagaacataacatatataaatctaaatatcaaagaaagtagttattttaatgcttctgatatacaaactaaggtaaacgcattaataagcgtatatggttattatgaagaaataaataaaggagaagctactgtagatgtatatacttccttgggtattacaggagtaacgaaagaaaatataatatttattaatacttatattaaagaaggacagtattttgatttgacatctttaaaaagcagtgtagaagtacttgaagaaaagtatgaggcttatgtaaaaataacttcaggaaaggcagttgttggagactatacaaaggtaggaataaaagatgtaacagaagaaaatattgcttatattaatttaaatatagatttgcagaattgttttgatacaccaacggttcaggctagaatagaagtacttgttaagcaatataattcttacattgtaattagtaaaggtagtgcaactgtagaagactatgaagctataaacataacaggtgttacaaaggataatataaagtatataaattgtgaattgaaaggcacaaattttgctgaaagtgctgaggttcaagctaaagtagatgaagtagttaaagtttatgaagagcttgttagaataaatctgggtacagcttcagtaaatgattatacagctattggagttagtggagttgcggatattaatatagccttagtaaaccaagatatgaaagaaaaaggttatttaagtgtggaagaaataaaacaaagaatagatgctgtttttagtcttcaaactgttctaggaagaataaattcatctgagggaatcttaagtgactatgaagcagcaggggctgtaggtgttactaatgaaaacttagcgtatgtaaacaccaacattaaaggaaagttatttgagtcacttgaggatgttaaagcatctgtgaatgaaattgtagcgcagtatgaaataagtattaagatagaacaaatagtacaaagaatcaatttaggtacagcatcagtaagtgattacaactacattgagattacaagtgtaactgacgaaaatgtagatgcaataaatgcagattttaaaggaaagggttacagtgatattgaagagattcgtgaaagagtgaatgtaataattaaaattaaggctgcattagatagggtgaattcaggtacagcttcattagaggattttagtactctaggtataacagaggtttacaaggatatcttggtgtatgttaatagtgatttaaagggcttaaattataaaactatagaagatgtacaaaaaagaatagatgaaaaaatgaatgtatatgtattcttaaacaaggtaaacctaggagaagcagttttaactgattacacttctttaaatataacaggtatagacgcaagtttatttgtttatgtaaatgaagacttaaaaggtaaaaactacacgacaatacaagaagttcaggataggataagtagcagggtaagtatatatgcaataatagaaaaaataaataaaggacaagcagtacttactgattattcaacccttggaataacaaatgtggatagtagtataattatatacattaatgcagatttgcaggggaaagattttaagacagtagaggaaatagaagaaagaataagtgctgaaataaatatttataaggcactccagaaaatcaatgctggagaggcagtgcttagtgattacggaattttaggaataacaggattggattcaaacttagtagtgtatgcaaatgcagatttacaagggaaaaactatactaatgtagatgaagtaaaagttacaattgaacaagatctcaatgtataccaaattttaaagaaaataaatgatggtactgccagcttgaacgattatagtgaagtcaatattactgaggttattgattacaatttatactatgtgaatgcaagaataaagggagcaaatttagtaaccttagaggctgtccaagaaagaattttaaatttagtaaattctattcagatatcaacagcttctggatatattaaagatgcttcaactggtaattttgtagtaggtgcagcaattaagtttaaaataaatgatggaactggcattgataaatatctttctaaaaatggagtagaaattgttgtatatacagatgctaatggaaaatatagtgttgatttgccagaaggaaactatacggcagtagctcaaatggacggatatattgctcaagagttttcaattatagctaatgcagcaaatgaaagtgtacaacaaaacacggctttagtaccaataagaaatgatgaaaaatatagtatagtactaacctggggggtagttccaagagatttagattcacatcttacaggaacaacagcagatggaacaatattgcatgtgaattataatactaagaaggcttatgacaatggcaaggaagttgcaagcttagatgttgatgatcaatctagttatggaccagaaacagttacacttgatgttgacggtaatggaacttataaatattcagttttcgattatagtgatcagtcaagtacaacttcaaatttaatgtcaaattcaggagcaaaggtaaatgtatataaagggaatcaactggttaaaacttatacaatttctcctaatgaagtaggagatgtttggaatgtatttcaaattgtaaatgggcaaattgtagatgttaatacagtaggatacactaaggttccagagtaatatttactaagtttatagataataaaagcgagtttgcagaaatgtaagctcgttttctattatgtataaggagcatgagttaatggaaaaatgctgaactattttaatacataaatcaaaaaaaattttatttaacgactcaattatacaaaattcaacaataatcagtggtataatctgactctatggataagctgaaaaacgataaaagatatgttgaaggaaaaatacaattgttatcaaagtacattggaattagttatataataagaggtgcataggatatggagaacaagtatattatggaaaaattaatttggacagagtgggactttgataaaatgaagtggcagaattgtaatatttatgcctttgcatttgataagtataattataaattaatgattgatattgactacatatttgaaaggataagttctaaaaacgaaggtgaatattataagtttttggtttcacctgctacattggtatttgaaaatgtacataagctggaaatgcatatggatagtaatagtgatttagaaatacatattaataaagtatatagagaagaaataaaacatctcagcataaaggattatgtaagtaaaagagtagaatggaaatggataattgatacaaaagaaggcaaaataagcttttattctactgggtttaacatgtacataagaagacagcctatattgcagcaagctcaaggtattgaatttgttaaaagagggtggatatcgttttaccaggggagcttggataatttatagtaatacttttaggtttgtctagtcacttgaaacctataacaaaggacaccatactaaaatccaatattttatttagtaatacccattagaatcatctaacttatgatataatagggtattattaaagttttaatataatttataaagctgaaaggtggattttattgtgacaggaaaaactcatattagtataggcttgatgtcttctgcagcagttctttcagtaaataatccaacgcctgaaaatatagcggtgggtctagcagttggagttttaggagcgttaatgccagatatagatacaagcagaagcaaagttagctataatttacgaaagatagtagtgtatgctgcactagttatagtaggtgcgtatattttaatggctaatttttatcctgaagttgaaaagactaatttatttcttaaaaatatgggagtatataaacttaaagattatattccttataatttgaaactttcaaatgcaggattattaattattgtaggatgtattatattttctaagtttacaaaacacaggagcttttcacatagtatattaggtctcatattgtttacggtgggagttaagttattactaggaaatatatttatttattttgctgtaggttttatatcccatatggtggcagatacctttacaaatagtggaatagaagttttttacccaatcaaaaaaaagatatccttaaagcttgttcatacaggatctatgttagatcactttacaggtggattagcttttatagtttttttagctataattttgaaaataaaataattgcattaaaaaacatagtgaagacaatatggtttttgctatgttttttgtgtattgtataaaaaataaatttaaagtgagacaataagtgtttttataaagtacttcaaaaatgtaattaattcatggtaaaatatacatagtaataaatataatgtaaaatgcaaagaagttaaggtaactagtaataaattcatacattatatgagtaaaatctatgtatacgatttctttgaatttaaagcaagttcactagaaaaatatactttacttttaaatagaagaaaaaatattataaaaatcaatgagaaggtgtgttatgttaagtgaatttccaaagaattttttgtggggagcatcttcagcagcctaccaggttgaaggggcttggaaagaagatggaaaaggagaatctgtatgggataacttttctaagattcctggaaaaacttttgagggcacaaatggagatgttgcagtagatcattatcataggtttaaggaagatgttgcgttaatggcagaaatggggcttaaggcctatagattttctgtgtcttggtcaagaatatatcctaaaggaagaggaaaagtaaatttaaagggtttagaattttataaaaatttagtagatgaattacttaagtataatattgaaccagttcttacgttatatcattgggatttaccacaggcgcttcaggatttatacggaggttttgaatcaagaaatgtaatatctgattttgaaaactactgtataaccttatttaagaactttaaggataaggttaaatactggataacctttaatgaacaaaatgtatttacaaacctagggtacagatgtgctgttcatccaccaggtattaaagatataaaaaaatactatttagcaaatcatattgttaatttggccaatgcttcagcaataaaagcatttagaaaatatgttccaaatggaaagataggaccaagttttggaatgggaccagtgtattcttttgattgtaagcctgaaaatgtcttagcaggggatgaggcagaggagtattttaatcattggtggcttgacgtatattgtttcggaaaatatccaacaattactttaaatcgtttagaaaagttaaaggttatgccagaaataaccaaagaggacttacagcttttaagagaagctaagcctgattttataggactaaattattatcatggtggaactgttatggcaaatgacaatgtaattagagaaaacttagataaaaaagatccttatttagttgaaaacagtgaagaagataagggatttaagtatatttctaacccatttcttaagaaaacggaatggaattgggaaatagatccacaaggcttaagaatagctttgagaagattaactaatagatataatttaccaattttaataacggaaaatggtattggagcggttgatagacttgaagaagatgaaagaataaatgatgattatagaatagagtacttaaaagcacatgtgttagcctgcaaagaggctattgatgatggagtacagttaattggttatttaccttggtcatttactgatttgttaagttggcttaatggttataaaaaaaggtatggctttgtttatataaatagagatgaacattcacaaaaggatttaagaagaattaaaaagaaaagcttttattggtacaaggacgtaatagagaaaaatagtgacaatatttatgggaggtaagtaattatgaagtttactaacggctattggcttattaaagaaggatataaaataataaatccaaaggtggcttatgagattaagatagaagacaaaaaagctactatttacgcaccatgtactactattgaaaatagagggaaaactttagatggaggaatgataacaatagaaataacctctcctttagaggatgttttaaaggttcgcatatatcatcatgctggatacttaaaggttggaccttattttgaaatagaagataaaaaattggacttagtttgtgaagagagctctttacaagtgaagataaaatcgggaaatttatgcgctaaggtagataaagaaaattggaggataggtttttataataaagaaaagcttataacagctagtctgccaggaggaattggatatgtaacaaagggtgaagaggaaagttatgtaaaggaagaacttagtatagatgttggagaactcatatatggattaggagaaagatttactccatttgtgaaaaatggtcaatcagttgacatatggaatgcagatgggggaaccggaagtgaacaatcttataagaacatacctttttatgttagtaataaaggttatggagtatttgtaaatcatccagaaaaggtttcttttgaagttgcatcagaaaaagtatcaagggtgcaattttctgttgaaggagagtatttagagtattttataataaatggacctagcttgaaaaaagtaatagagaactatacaaccttaacgggtaagccagcccttccaccggcttggagctttggactatggctatcaacttcttttcttacaaattacgatgaagaaactgtaaatagttttattgatggaatgaaggaaagagatatccctcttgatgtatttcattttgactgtttttggatgaaggaatttgagtggtgcaactttaaatgggatgacaggatgtttaaaaatcctgaaaaaatgcttaaaacaataaagagtaaaggaataaagacttgtgtttggataaatccatatatagctcagaaatctcctttatttaatgaagcagttgaaaatggatatcttcttaaaagagctaatggagaggtatggcagtgggatatgtggcaagcaggaatgggagttgtagattttactaaccctaaggcaactgtatggtttcaaaataaactagaagaattagtagatatgggagtagatgcttttaaaacagattttggagaaagaataccaacggatgtagtttattatgatggctcgaatgcaaaaaaaatgcacaattattatacttatctatacaataaaactgttttcgatttgttaaaaagaaaaaagggtgaaaaagaagcagttttatttgcaagatcagccactgtaggaggacaaaagtttccagttcattggggtggtgattgtacttcaagctatacttccatggcagaatctctaagaggaggactttcctttactctaagtggctttggtttctggagtcacgatattggagggtttgaaaatggaactacagcagatttatataagagatggacacagttcggactactttccactcatagcagatatcatggaagtggtgaatacaaggttccttggatatatgatgaagaagctgtggaggttacaagaaagtttacaaaactaaagtgcagtttaatgccttatttatataaaaatgcatgtgaaacttctgaaacaggtgtgtctatggttagagctatggtgttagagtttatggaggatgaagcttgttcatatttggataggcaatatatgcttggagacagtttgcttgtagcacctatatttaaggaaagtggtagagttagatattatattccaaaaggtagatggacaaatatcttaactaataaagttttagatggtgaaaggtggtatgaagaagaatatgattatatgaatttgcctcttttagccagggaaaattctataataacctttgggtatatagattctaaagctgaatatgactacactaaaaatccttcatttaatatatttgagttacaggaagaaaaaatagctaaaagctgtatttataatagtttgggtgttaaaaaagttttaataacagcagtaaaaaaagatgatgaaataaaaattgcaactaatggaattaagggagaatacagtatacttttaagaaatattaaaaaggtctcaagagtatcctctggcaaatggcagtctgaagcagacggggtgaaaatagagttaagctgtgataagcttacaattaaactttaatctagttaaaaatactctaggtatctattactagaatatatgagtatggagggttgcattaatatttgattggacattaaataagaaagacgaagaaacctaatatttttctatattagattaagtcatggaaatattagaaagtattttacagagggggtttaagaggtgaagaagtatataggatttgatattggtggaacaagggttaagcatgctgttatatatgataatggagaaataaaggtaaaaggtgcctatgatacaaactataaatgtagaaataaattcatagaagatattttaaaagtcattaaaatctataaattaaagtatgatatttcaggaataggaataagtatgcctggttttgtaaatccttgcacagggcatacagaaaaagcgggtgctattgaagttatgcataaccaaaatttgaaagagattcttcatgataatatagaacttccaatagaaatagataacgatgcaaattgtgctgccttagcagaaaggtacagcggaaatgcagtgaattgtaatgattatgttctgatgaccgttggaactggtattgggggtgctataattacagatggaaaattattgtatggccataactttagaggtggagaaataggatttatgacaataacagaagatacagatggggttaagacaataagtgaaaattgttcaacaagaggtcttttagaggaatataaaaaatataagaacatagataaagaggcttcagtagatgggagagaagtttttgaggcggcaagagaggataaagaacttagtaagataattgatgcttggtttgaaaggttatcacgtgctgtatttaatcttgcagttattttaaatccggagaaaatactaattggaggaggaataagtgaaaggaaggactttgttgaaaatatattaaatcacttagagaaaaacaagtattgggaagatttaaaggtagaagtaagcgcatgtaaacacagaaatgatgctggcattataggttctgtctataagtttttatcataacctaaaaaaagatgagggttatcatgaatattctaaaaataatggtaaaaagcatttacaattgtaggaataaaggattaatttaaaattatataataaaagctatgactactatattaatgatagtatattctcttagaaggatggcttgaataaaattctatctaaccgtctaagaataatattattttaatatagtagtttttgtttttacaaattggatacaatatgagaaacaaagagttagtacgagatataaagggttatttatctatgatacatatactttttaataaattgagtattttatttagatttgataatatagtagtatggtttagaaaaattagtaataatatattattaaatattatgtatttaagtagcactataggttgttttatgccattaatatgatataatacttttgggttttaagtaaaagttttgctataacaggtgaaatttcatacttgaattttacatatttgctataagttatttatagtaaggtttaactttatgtatgcttaaaaataaaactttaggacactatagcgcatatataaatttttatggttgcaatgtgtttataaacaaatgtttaatataatcaaggagggaaattcatgtttgataatgatatatccatgagtttagtaagagtaacagaagcagcagcactacaatcttcaaagtatatgggaagaggagataaaattggagctgatcaagcagcagtagatggaatggagaaggcatttagttttatgccagtaagaggccaggttgtaataggagagggagaacttgatgaagctcctatgctttatataggtcaaaagcttggtatgggaaaagactatatgcctgaaatggatatagcagtagatcctttagatggaacgattttaatttctaagggactacctaatgcaatagcagtaatagcaatgggaccaaaaggaagtttacttcatgccccagatatgtatatgaagaaaattgttgtgggacctggagcaaaaggtgctatagatataaataaatctcctgaagagaatattttaaatgtagcaaaggcattaaacaaggacatatctgaattaacagttatagttcaagaaagagaaagacatgactacatagtaaaagcagctatagaagttggagcaagagttaagctatttggtgagggcgatgttgcagctgcacttgcttgtggttttgaagatactggaatagacatacttatgggaattggaggagctccagaaggagttatagccgcagcagctatcaagtgcatgggcggagaaatgcaggctcagcttatacctcatactcaggaagaaatagatagatgtcacaaaatgggaatagatgatgtaaataaaattttcatgatagatgatttagttaaaagtgataatgtgttttttgcagctacagcaataacagaatgtgatcttcttaagggcatagtattttctaaaaatgaacgtgcaaaaacccattccatattaatgagatctaaaactggtacaataagatttgttgaagctattcatgacttgaataaaagtaaattagtggtagaataaaattaaaatgttcgatttacggcgaagggggatagtaaatgcaggtaagtattgaagatataatagaaaatctcgatttagaggtcttggttaaggggaaagatggaataaaactggggttaagtgatataaacagaccaggactacagtttgccggattctatgattattttggcaatgaaagagtgcaggttataggaaaggctgagtggagttttctaaatgcaatgcctccagaaataagagaaaaaagaattagaaaatattttcaatttgaaacaccatgtattgttcttgcaagaggattgaaaccacaaaaggaacttcttgattgttccaaagagtacaataggtggcttttaaggtcaaaggctcaaactactagatttataaataaaataatgaactatcttgatgacaagctggctcctgaaacaagaattcatggagtgttagttgatatctatggattaggtatactaatcactggagaaagtggaatcggaaaaagtgaaactgcacttgagctcataaaaagagggcatagattggttgcagatgatgctgtagatataaaagaaattgaatcagttcttgttggaaaatcaccatacataacttctggtatgcttgaggttagaggaatgggaataatagatgttccagcactttatggtcttagttctgttttgtcagaaaagaatataaatcttgtaatataccttgaacaatggaaagagggaagagactacgatagacttggtacagatgatgaacacataaaaattttaaatattcctgtgagaaaaatgacgctgcctatacgtccagggaggaatgttgctgttataatagaggcagcagctgctaattatagatataatttaagcagtaaaatatctcctgtagatactattaataagagaattgaagagtctacaaattatgattaatagtaaaaaagaacttaggaaaaatatggttttaaaaagggattctttagagccagatttaaaatcaataaaggataatatgatttataataaagtcataaatagcatacaatataaaagtgctaataatatatttgtgttcgttagttacaaaagtgaagttgatactcataatataataagaacagcaattgcagatggaaaaaaagtttttgtgccgaaggttatttccaaggaaaagggaatggaggcagcagaaattagaggtttttttgatttagaaaagagtgcttatggaattttagagcctaaaagttcaaattacatagagccagagagcatagaactactgttagtgcccggacttgcatttgatgaaagtggaggcaggataggttacggtggtggattttacgatagatatatgagtcttttagataagtcagcagtaaaagttggaatatgctatgactttcaggtaatagataaagttattatgaatattaacgatgttccagttgataaaattattgtaggctaaagaatttcattatttgaggaggttaaatttatgccaaatgatttattaaaagaatataagaatgcatgggataagtacgacgataaacaattaaaggaagtttttgcattaggagatagatttaaaaattttatttctaattgcaagacagaaagagaatgtgtaacagaacttataaaaacagcagaaaaaagtggatatagaaacatagaagacatattagcaaagggtgaaacgcttaaggaaggcgataaggtttatgctaataatagaggaaaaggattaataatgttccttataggaaaagaaccactttataccgggtttaaaatattaggtgcacatatagattctcctagactagatttaaagcaaaatccgctttatgaagacactgatctagctatgcttgaaactcattactatggtggcataaagaaatatcaatgggttacactgcctctagctatacatggagttattgttaaaaaagatggaactatagtaaatgtatgtgtaggtgaagatgataatgatcccgtttttggtgtttcagatatattagttcatcttgcaagtgagcagcttgagaaaaaggcaagtaaggttattgaaggagaggacttaaatatattaataggcagtattccgcttaaagatggagaagaaaagcagaaggtaaagcataatataatgaaaatactcaatgaaaagtatgatatttcagaagaggattttgtgtctgcagagcttgaaatagttccagcaggaaaagctagagattatggattcgatagaagtatggtaatgggatacggacaggatgatagaatatgtgcgtatacatcctttgaagctatgcttgaaatgaaaaatgcgaagaaaacttgcattacaatacttgtagataaagaagaagttggaagcataggtgcaactggtatgcagtcaaaattctttgaaaatacagtagcagatattatgagtctatgtggagattacgatgagctaaagcttagaaaagcactttacaattcagaaatgctttcttcagatgtaagtgcagcttttgatccaaattatcctaatgttatggaaaaaagaaattctgcttatttaggaaaaggtatagtatttaataaatacactggttcaagaggtaagtcaggatgcaatgatgcaaaccctgaatatatagcagagcttagaagaatattaagtaaagaaagtgtaaattggcaaacagctgaacttggaaaagtagatcaaggtggtggaggaacaatcgcatatatacttgcagaatacggtatgcaggttatagattgtggtgttgctttattaaatatgcacgctccatgggaaatttcaagtaaagcagatatatatgaaactaaaaatggctattcagctttcttaaataattaaaaagaacccttgtggggttctttttttataataaaattgataaatagttttattttgaaagcaggatatctatgttattctcatctaaatatatttctccaattcttccatgcttcgtgtcgcttgaatcatccgtatgaaagtcagaacctgcggtaacaagcttattataaatttttgctaaactcaaaaatctttcagtatcagattcggaattcattggataaatagcttcaataccatcaaaatcaagttttaaaaaatcttctattggagttttcttaattagaacgggatgagctaaaacaaccactgcatttgcagcctttaaaagtttaattccttcttccacacttacttttttattaggaatgtatgcaggactttctttgttcagtatattgttaaatatatattcgtaagtataattatagccctttgcaagaattgcacgtgcgatatgtggtcttgcaataacattgcttgcttcttttagaatgctcgcataatctaattttatattaaagtaagtatctaagttttcaactatttttttggctctccatactctataattctgcatttctgtcaagaaattttgaaaatccttattttcgtaggaaatatctctgaagtatccaaggatatggatgctttctccatttttgagagttgaaagctcaatacctggaagcactttaatacccagttcatttcctacagctattgcttttttaacggaagacgtagtgtcatggtcagttatagcaagtatatttataccagcagtttttgctagttctaatactttttctggagtatattttccgtctgatgcatttgtgtgaatgtgaaagtcacctttaagatacacaaaatcccctcctttaaactgcattgtttataaaaataatataccaaaaattaattcatttgtcgatttttaaagttaccttggtatgatgtaagtgcaaaaattatatggattacaagaaggtggtatatcctttatattaaggaagtccttaggatagtagccgtcccaaggatatacagcagcatagttctcgtcatatacatcaataacaaactttgaatttgagaaggttaaaaaaagtctatacataggtttagcgggaagttttgaaggcttgtttatgtaattatgtttcttcaaatgaactaaaaagtcccttattgtatctatttcagtggcagttaaattgtgatttttataatatgaggtatctatcaaagaaaattttaaagccttctcttttacaaaactttttgcaagcagattagtataataaaagttaaaaggtttcttcttatctataagttcattgcagcctgaaaaagatgtacaaaaaatcactaatagaattaggaaagtaattttttttgctttaatgataatcaccagcttacttaaattcatttatagggttcccaaaacaagttagaaaccctatataatctaaaatatgaagagaatttttattttattacaaagttaagtaagacttttcttgtggaacttttcaatgtatggttctgcatgtattacagtacaagaatcaggaaaaactcttcttatttcatcttcaattgaggaacatatatcatgtgtttcttttagagaatctgtgccaactatttgtatgtgaatgtctatttctcttgtatttccgcatcttcttgttctaagtttgtgatattccttgatgttgggatatttttttactattttaactatcttatttatatcatctttatccaaactgctatctactaagtctcttaaagatttttttattaagtcaactgcggtttttattatgagtattgctactaaaaaagctgttattgagtcaataatttttatattagttaattttaataatacgagtcctaaaaaaacacctaaggaagtaaaaaaatctgtaaagaggtgcataccatcggcttcaagggcaatagaatttgtatccttagaggattttaaaagtattatagaaataaataagttaacagcagaagagataagcattatatatatacctgaatctatatttttcacatgtgaattagatactaatttattaaaggcttcgtaaattatcattattgcggcaaacattatgagtattgcttcaacaaaaccagatacgttttcatatttgccatggccaaatggatggtcgtcatcttcttttaaggaggatttctttatagaaaaaaatgctattaaactagctataagatcaatagaagagtgaaccccctctgatagtacactaattgaattcattgttataccagcagtaagtttgaaaattattagcatgctatttgatgctatagacagaactgctgaatttatttttttcattttaatctctccaattcatgtttgtgcttgtgcaaagaatttttaaaaaatctagttttaatatataatatacatatagagtattagcttattgatgtataataattcataatttaagagttttactagagcatattaaagacagccttaataaacttatacatttaagattggtataagctaagggtgcataaggaactctatatatagtattaattctggatacgtttcgtgagaaaaaattattaagaacttggggtaataaaatgaacaaaaataataagtataaggcaactatgctattggctatttttgcaggtggatattttataagtagtgcgtttagaagtaacttttacggagggttaatggaaagtatatgtgaagctgcacttgtgggtggcatagcagattggtttggagttactgctatttttaagaagccttttaatataaactggcctaaaagaatatttagaacggacatacttagagaaaataaagaaaagtttatttttactatagttgatatggttcaaaatgatcttttaagtagggaaaagattaataacaaaattaaaaattatgattttttttcttttatattaaatatgaagcttatcaatgatggaaccttggagacgttattttcagaggatgcacttcaaaggatattaaagaaaagagtatatgaaaacaaagtatatgtagataaggctttatcaaaagttttagaaagcagtatctatgatgtgggaataaatgctattattgataaagttgtaggaattttgaaaagagaagacagtgcaaaatttatttctgaaatagttgatagaactataaataggtatgaaaaggacagcgcgggaagaagatttgcaacaaaaattatagtgagtactgttttaaagggagatattaagttggctccatacattattatagatagaactatacaaagattaaatgatataaagatgaacaaagataagtacaggagtaaaataaaagatcttatattggatgtttacgaagatggagatgaagaaaaaatatcttcaatattgagttcagtaaaggaatgtagtattagatgtaaaaattgttctgaaaactgtgaaatgattgattataaagaaagtgaaaatatgttttcgaaattacttattagagttgtaaatagtttaggaaaagaacaaataaacaaatacatagttcatattattgaaagaattttagattctaagcataaggaaataggggaattagtaaaagaaagcttaaataaatataatgatgaagaaataataaacttagcatatgataaggctggagatgaacttcaactcataagaataaatggttctgttgttggaggaatagtaggtatgttagtatttttaattacaaaaatattagtttgaaaataggacggtaagaaatatgaattataaaaataaagccaacgtaattcttggcattgtatcagcgttttttatattttcctttatattaaaatattatattgtgaataatgcatatacagattttattttcacagtaattaaagcagcacttgtaggaggaattgctgattggtttgcaataacagcaatttatagaaaaccacttggaatatcttttcatacagcattgattcctagaaatagaaagaaaataatagaagctactgctgtttttgtggaaaatgaattattaagtaaagaagctataaagagcaagatggagaaaaataatattgccaataaaatttctgaaaatattattaataacaaagatagtataaatataaaaactataaaattattaaatgaatatgctgaaaaacttgatagagataaagtaaaggaaaaggtgaaaaaactaaaaactaaatatttacaagaattttatgatgaaaagagaataaagtgtgtactttcgtgtatatataataaagatggggaaaaaattttagatgatatttttgattttcttataaattcagtaaaaaagcatgaggttcaagagtacatatatgaggtaatggctaaacttaaagaagaaaatactagaggatttattgcgagaataggaatatcaatttttgaagcatccgatagtgttaatctaagggaggccagcagaatattccatgatgaacttctaaaaggggttagaaaattaaaaaatcctaaagattattataggaacaaaataaatactgaaattaagttatatttagataacttagattctcaggataataaattggagaaatttaaaaactatatttttaaagatgaaaacatagaaaagtttgtagataagatgtttacaaaatctaaaatagtttttaaggattatgaaacggaaggatattttgtatcaaaggttttgtttaagcttttctcagatgtgtttgaggaagtagttagcgataatgaaaagttaagtaagctttgtgaaagggtagagaaggctgctgtagatatacttgaggaaaagcattatataataggaaagttcataagagatactcttaatgagttcgacgacaagaagttgaatgaatttatagacgataaggttggaagtgacttacagtggataagaataaatggttctgttgtaggtggatttgttggcatgcttcttttcgtaattatgaaatttatatataatccttttttagcaccgcaaattagaaacatattttaaaattgaatcggcaagatttcttgccgatttaatataattatatataatcagaaagttcatttaggtagtctttaatttcagatctattaagattccctttttttaactcttcgtcagacttattaagaagttcagagtaaaaagcagcggcttttcttttgaaaccatccttatcactgctagaattcataagttcataaatgcaatcgtctgctttagcatagttttctgtaatcttaaaatactcaaaaactttttcaagaaaatcttcatctaattcgtattgaagtaaattttcagcttcaatatctgacaaagacttataattttctatatcacattcaagatttttatcgaaaacttcaaagattaaataaaacgctctttcatatctaaaaaaagcttcagataggttattgttatcttcataaatctttccttcttcaaaaagaagagaggatacaattacaagtttatttgcatcttggatgccattagtttttaaaagatttaaaaggtctgaaagtgataatgtatttataaaactagaactcatacctgagaatttttttaaagaagcatctatttcaggaagagcattttctcctaagtcttttaatctatgtatttcatctatggaggttgtaaattcctcacttatgagtttacttaaatttttcttgatcaattaaaacaccccattaaaaaatttagacatataaagttacaaacaatgtcataatatattgtaaaatttaattgtatatattgcaaccgcattgattataaaatacctataagttgtggtataatatagtgaaaccttaacaaaacttaagttatataagaattaaaaacacaatcaccaagtgattttaattcttatataacttgtagttttgtaaggtttcacaaaagagtgaaatcccaaggatagactaaggttaagaattaaaaacacaatcaccaagtgattttaattcttatataacttgtagttttgtaaggtttcacaaaagagtgtgacttaatttgaagaaacattgaaacttaatttaggagtgataaaatggaaagactgcttgtgttagatggtaatagtcttatgaatagggctttttatgctttgcctgaacttacaaatgctgaaggactccatacaaatggaatatatggctttatgactatgcttataaaaatgcgagatgaaataaagcctgattacatagttacaacctttgataggaaagcacctacctttagacataaggaatacgaggattacaaggcaggaagaaaaaaaatgcctcctgaacttagtgagcagtttcctgtattaaaagaattacttgaaaagttagctataaacatatttgaaatagatggttttgaggccgatgacctcataggaacattagcatgttttgctaaagaaaagggaatagaagtatacatagttacaggggataaagatgcccttcagcttgcagatgataatgttaaggttgttataaataaaaaaggaatgaccgaaaaagaaatatacgataaaaatagaatgattgaagagtttggtgttactccagttcagtttatagatgtaaaaggacttatgggagataattctgacaacataccgggagtaccaggaataggccctaagacagcctttaagctcatacaagaatacggcagtgtagagaatgttctcgacaatatacaaaatataaaaggcaaaaaaataaaagagaacttagagaattatgcagagcaagcagtttttagtaaaaagcttgcaaccataatgactaatgttcctattgaaatagatattgaggaaataagatctaaagaaagttttgatgttgagggtgctagacatcttttaagaagacttcaatttaagagtataatagaaaaaattccaagtcttaatgttgaagcggaaaaaagtgattttgttgtagagtataatttaatagacgaatttccaaaatttcatgaattattttcagctattaaagatactgaaatttatatgtcatattctataggaaatggagagctgtattctaagatttatattgatacaatttttatgaaagtagaagaaaagacatatatagtagatttaaagaaaataattgagcaaaatagagaagatgttctcaaagatttaaaagagttctttgagaataagaaaatagctaagataatacatgattctaaaaatatgtatacagtgcttatgaagaatggcataaaaatagagaatctggcatttgatacggcaatagcagaataccttataaatccatctaaaaaagagtacaatttaaaagacgcggcggaagagatgctcttattggatttgacgggagaagacaatgatattaaaataaaagaagtttacgttatggataaaatttacaataaacttaaagacaaaataaaagaatatgatatggatgagttatactataaagtagagcttccactcatagaagttttatcctctatggagagtgaaggatttaaggttgaaaaaaataaacttcaacaaattggcgataaatttacagttgaaatagcaaaggttaaagatgaaatatataacatggcaggtgaggagtttaatataagttctccaaagcaacttggaaaaatattatttgaaaaattggatttaccagttataaagaaaaccaaaacgggttactccactaatgctgaggttttggaaaagctgatggataagcatcctataattgaaaaggttgtatactatagacagcttacaaaactctattcaacatatgttgaaggacttaaacctgttatagatgttgatgaaaagatacattcaagttttaatcaaactgtaactacaacaggtaggctttcaagtacagaaccaaatcttcaaaacatacctattaaaaatgagatgggaagagaaataaggaaagtttttgtgcctgaaaatgataattgtataatactttcagcagactattcccaaatagaattaagagttttagctcatattgctgatgatgaaaatttaattaatgcatttaaacatcacagtgatatccatacaaagacagcttcggaggtttttagagtacctattgaagaggttacgtctagaatgagaagtaatgcaaaggctgtaaactttggaattgtctatggaataagtgatttcagtctagctcaggatataaaggtatccaagaaggaagctaaagaatacattgatacttattttgaaagatatccaaatgtaaaaaaatacttggaggatatagtggttacagctaaaaagaatatgtatgtaaacactataatgaacagaagaagaattattccagaaatagcctcatcaaataaaattgttaaaggctttggagagagacttgctatgaatacacctatacagggaagtgcagcagatcttataaaactttcaatggttaatgtgtatagtaaaataaagcaactaaagcttaaaagtaggcttatacttcaagtgcatgatgaactaattttgaatgtacataaggatgaactcgaaaaagtaaaggaattagtaaaacttgaaatggaagaggttatggaacttaaagttcctttggaagtagatatagaatcaggaaatacctggtatgaagcaaaataatctgtttggtggtggggataaatgttaaagattggattgacaggaggaataggcagcggtaaaagcacaatttcgagaatttttaaagaaagacaaattcttgtggttgatgcagatgaggtatctaaagaggtgctaaaagagcatcctgaaatattaacagctgttagaaataagtttggtgacaatttctttgatgaaaatggggaatttacaagaagagaatttggaaactttatttttaacagtgagcctcatagaaaagaatatgagaacataataatgccatatataaaaaaagacatagttagaaccatgaaactttatgaaagtcttaatgaaaatgtatgtgtattagatgcaccaacgttaattgaaaatgacatttataaggacatggatataaatatacttgtatgggttgataaagctactcagataaagagagttcagaaaagagatggcatgtcagaagatgaggtaatcatgagaattaactctcaaatgtctttagaagaaaagaagaaatatgttgattttattattgataatagtggcgaatttgaaaatacaattaaacaaatcgacagaataatgcagtctgtaagtataatgaagggaaaataaatgaaagctaaaatctttatattttttataatagtaatcgctttattcttagcgttaaatacaagaaacatattaaagcacttttatccagtaagatatgtaagttatatagagaagtattctaaggaaaacgatattgatccttattttgtaatggcagtaataagagtagagagtaattttaatgcttcagcaagatctaataaggatgcatacggtcttatgcagataacaccagaaacggcagaatgggcagcagaaaaaatgggattgcaaaatttcaaggtggacgacctttctgatcctgaaattaatataaagataggttgttggtatctaaaggatttgtcgagtgaatttggtggagatcaaacattaattcttgctgcatataatgggggaagaggcaatgtgaaaaagtggctgaataataagacaaactctaaggacggaaagacacttcactatataccttatggtgagacaagtaagtatgttaaaaaagtaatgatggattataaagtgtataaaagattatatgataatgattaaaaatagacacatgtaactagagaattctaggatacatgtgtctattttttatttatatataaaatttattaatgttgttgacaaaaataaattatgtagtataatattctttgtcagctgttttgggactaatatgcgagggtggcggaattggcagacgcgcacgtttgtgagggcgactactcggtgattagcatattaaatgagttttgtaaaatatataatcttgacaaaatgcagattataatataaaataaatattgttttgcgagagtgctggaatcggcagacaggcacgtttgaggggcgtgtgtcattgacgtacgggttcaagtcccgtctctcgcaccaaaataaatgattttctgaagtatttgtgaagctcttattttgaacctacagttcaaacaagggagttcaatatttagatgagtatatgtgcttcatgtgaatccttttacggtattgaatgagatagatgcatctgtgaggacacccacctatcgtagagataggtgtcaaaattggggtaacggtattttggatttacatttgaatgtagagagaggttttaaagacctctctttttttattatacttaatgaatataatcacataaaaggaaatcatactaacataatggcttaatttgacaataagtataatttatactaatatataattagtaaacaataattaagggggtattaatattgctaaatgtaaaactttgtagtgagaaaaaaatatccattattttaaaaaagatatattatatattacatcctgatcaaattccagaaggagttaataggatagaatttgcttggttctatgggtatgatgataaataaaatatataataagatattaaaaaatttttggctgaattgcagcttaacagttattccttccatattttttttggctattaaagtaattggtaaaaatataggattagtaaataaacaagatgatttaacttttttgggtggtatattgtttagtatatttatattttttacttttgcgtatggcgttattaaaagctattgcgattgtcatatgaatagcaaaaaaagtgaaacccaaaatatacttcagaatgttgcttctagcacaacttctgtatgcaataataagtttcataacttaatcgaatatatagaaaaaagttcacaaaaagaaaaattacccaatattattcgtgatacaatgaaaccagaaatacaaataaaagaactattaaaagaattagagatttgtttaaactatgtaacaggtataggaagggataatatagagataagtatattccaaaaatttgacttttggaataaatgggaatgtaaatattataggaatacgaatagttgtgaaattaataatattgttagtgatgtaagatcaacagcaaatcaagttataaatggacaatatgattctttattttttcacgataaaagacaagctatagaaaaaaatcaatatttaccaaacgttaaggatcaagctagtcaaaatgaaggttcaataatatgcttagacatgtcattgagaaaaaacaatattaaatatatatcttctgtattaaatatatctacatatggagaaaaaataattagtaaggacgataaagaattaaaaaataaaattaagcactttgtaattgatccatttttactaagaataaaaatggagttatgtaatgaatatatattggagttatataacaatcaggaattcagtaaagaaaataaggttataccaatagacagtaaagtaatgaacaattaaacataaaagactcttagattattatcaagagcctttttatattttgaaattaattatatatttatggtaaaatatcttaggaatctataataaataacatcatggaagtgaaaatcgtatgaaacatttattctctaaaaaaatagtatgtatgaattgtggtaagttttttaattttaaaaacgataatggaatttatatttatatatgtagtggttataagaattatggatcaaaattttgtccaaggaatgttgtacatgagaaagatcttattagtttagtaaaattacatatgagtaaacatttaaataagtcgcataaaaaacagattttatacgaagatttagaaagatttattaaagaaaatattgtaaaaatagaagtggacaaagataatattgaaattttatattctgattgtactagaagcttttggaataaaaaagatttgattctctaatttaggtcgaagaaaattaaaaaaataatcgataggggagaagtaaatctccctttttatatggtagtttttattggattagtttttgcaaaattgttatcttttgctctaactgcggtcaacaatgtgtttatctgagctaaaactttatccttaaataaaatacattttgcttgagcaactaattctggagtagttaattttgtgcctaactcgcttgataaaacttgtgctgctgcaatagaatactttgctataaagttttcatcaataggtattattttattagggattaccagcgaaactgtatctccattagtttcgtcttccacaatatcttttccattaacagtatactttcctgtaaaagaaatagcgctataagttaaatttaaaggataatcttttaatagagcctgctcatcttcggctgtcatagcaagatttccataagaatcaaaagtggtagttgttgtgaaaatattatttgtaacatcttgagttgtattgaaattcatataagcatctccttacatatttttatatattacttttaacatctctataagctctctaacatcttgtttttgtatattgtctgaaatctcatttactcctattttatctgcaagctttatgttacaaatgctttcagattgattatcgttttgcttttttatgctaaataacatttctgtttgtggacttaaagtagcagaaatactatttaaaatttgttctccattctctgttaaaaaatttgaatatgatatatttacattcaatcttatcaccttctatacaaaatattgaatatagaatcctacatttggctctattatttttaaactatttataaaaaaatcttcttttaatgtttcaaaagaattttctaaagcacacgtatatgaaaggttatttattctgatagtacacttagtatctggtactagctttatctttttagctcttaaactatctgaaggtaaatctgtaaatttagaaaaatccaaaagttcttgattggctgttgaagtcgccctataggaataaaaaccacttgtttgtatcataaagaaccttctttctcttataaaaagagtaagataaagtcttactctaaaattatttcgctatttgtccattacttatagttcctactgttgctattttagctgtatctatagcccctgtcgtaatgttatccgcagaagtttgagatactgcattatttatgtttttaattttctcatttagaatagtattttgatttgtaagagtgcttatctgagtatttaaaacattattttcattagcagtttgagctatcttagtctttagctcatttactaaaccattaacttctgtgtttttagaagttaaatcagttacttgtttttgcaatgcagatactttttctgctataagcttatctactttttcatttatttgttgtatatctttattactaaaaacagtatttctaatttcattttctacaatggttttaacatcatctgtaatagttacaccgctttctcttaaaagagcgtaaatatcatttgtagcagtttctcttcttattgagccagtgggatcacttgctatattatctaagttaagaaatttatcttcagcggcattagcagcagttaaagcatactcagctacaacttttgcgacattgaaacctgtcttagcatttcctgtactaatattactaccagcggtagcaaaatcatctacctttttacttagcatctttatttcttctaaaatagccttaacatttactttcttatatctcaaaaaataggctaagaaaaataaaataacaactccaatagttacacctgtaatttgtaaaaattctttcatttatacatctctccttataataaaattccatgtaatttattgcatggaattattttctctatttttatttattttgacaataaagttaaccacgattgagaaccaaacaacccatctgattttaaactatgagatgattgccatgcttgtacatgacttgcggtatctcgtccatatataccatcaaactgtatgcccatattatattgaataatacgagtaggtattctatgaatataaggtctgccgcataaatcttttccataaatctgttgtattgcatttacacattgttgtccccaaatgccatctgtttttagaccacagacttgttgaaatactctaatttgctgtgtagtcgcattaccttgtatcccatctacaacgagcttgctagaatataaaactgcatttaattgagcttgtatagttttaattctgttgtatgtttggacttgcatgttagattgtaccatccgcggtgcttgtcccgtaaagatactatcattaaaataatctaaatcaatatctccaacaacgccatttattctttcattttcactatattgccaacttactatattaggaaattgagcaggctgtctaccatatgaagctaaccataaaggcacattagtaatattaccttttagatattcataataaaatgaaagtccactataaagtcctattctataaccttgtgattgcacgtaacctataaatttatttgtgtaatcaattgcttgccatttagtccaattagattcattctctatatcaagccacaatattgtgtcactatgaagcccttgaacttttgataaaaaatgttgtgcttcagctacaggttgccctgtattatctgcaaagtgataataccctactttaaaaccattttgaattatagcattatatctataattcaacagactgtcattgtgacacaaaccttctgtagctttctgaatgactacagaaacaccattgctttttaattgctgataatttgaaatattatcatactcatacacatccacacctttataaatttgtgcatgaatatttaaaggcataaaaataacagcagatataactaaaactgctgttaacaaagtcactattctatttttatttttcatctaaacaccttctttttattttacgtgtaattgtaataagtagataaaaaaacttattattccaccagctaaaatacctatgccccatcttagcgtacttgtaagatttcttaaatctacacataaattgtctatcttttcctcacttttagatttatattgctcgagtttatctaatctttctgaatgattatttaatctactctcatgttcgtttacttttttatcaatgttttgatgcttattttcacaaagttttgaatcataatcttcactcattttttagtcctctttcttgatttctccttttccttttttatgcataaatgaaagcatacccttcatattttccgcaccatctatgtctatatatatttgtgttgtagaagtatcattatgccctaaaaagtcttttatttgatctattgtagcgccatttctttttagccaagtagcagcataatgcctaaaagcatgagtataacaatcttctccaattatttttgagaatttgttcatccatccattcactgtacttacttttgctggataccatttatccttatgcttaactacaaacaaatcatctgtatctattcctagttgttttctttcttctatccataaatcgaaggcatgcttaacaatatcttttattataaatttaaccaatggttttcctaatttaccatgtccttttgtacgaatcttaggagtatgatacattccttcttcatctaaggagttttctgtaaaaaaggaaactttaaattgtaatatttctgattttcttacccctgatgcagccaaacaagctacaaagcaagcttgttgatattttttatctttaataagcatttcaattaacttttcaacttgttcatttgtaaacactgttttttctctagtttcttgcttggttggcggctttattttagatatgatattccgaaattcagggtattcatcatctaatatgtcttctacaaaagaagacattgaagataatggtgctcgtaaatgttttattcttgcaggagataatctttgtgtattaagcaaccaattctgatatagcattatatcttttttctttatgtctacaaaccttttatttctagcaaatttcaataaccatactaaaaatatctttatgttactcttatatacccttacagtttcttttgacttatcttctgcttcacaatattgaataaattcttcgaaaagctgtttgtttaaaggatttactttatcccagttatcattattaacgtacctatgttgattagttttccttggcacattatcaccctctatatattttcttgtaaaaaaataaggaagccattcacagtgccaataatattgtgaactcttccttgggacaaagataaggtattatttaagaattttttgaataataccttatcaatattttttattctttttaaatttttatttcttctataattcaataaccatacaagaaatatttttatatttgtctcatacactctcaaaatatcttgtgacttattctgtaatcttaagtagcttagaaataagtctaagaatatcttatttctcttatttattttttgtaacttttcttctgtggcataaggaagaccacttctattttttctgataatttgagtattagcctttctcatattcaatcattcctagtacttattcaaccccatttttagctgtttgtaataaaaaaccaagcaaaatcatattttttcttttgcttggtttatacagatttttgctccaattttttcatcataattgtctctattaacacaacttgatgtctctgtaatctcaaatccattttttaaaattatcttcataaattttataactaggaatatttccactacatgatatatttggctctgctttgactaaatttatttttatataattatccatccgtataaatccttctttccaaatttgtgacgataaatttcatgttttatattttaaaggtaataatagacactattcatttcatcatctttcgtatccatatcacacctattatcatcttgttgcacctcaacggtactgcttttaatttgacttatattatcgttctgcaccaaaaagcaaccatttatagctaaacgatataaaacattcttgctttcattacactttctttttatataaaaataacaccctatttggatgcttttaactcttgaatagaattttctaaagtagttactctagtttctaaacttttacttttggcacttaattcttgtattgcgccaataatatagggcaaaatagaattataatcgggggcaaaaaagtttgtcccatcttctgttgtatataaaattttagaaaactttttatttattttagataattgctgtgctattgtaccaacttctatatgctctccagtttttataaaatcaaattcttttaagtttatttgatttataatacttgaacaatttgtggtaattggctttatatttgttttgagtctttcgtcactggcattaaagttatacgcccagtaagtcgttccgttgttacagtgtactcctaatccattactatcctcgttcatgataaagtccatgacatttctagaacttagaatatagtaatcttgggatgtgccattatctattgtatttcgtatcaaatgataattccaacttttaccaccatcatcgaatccaacttcgaattcaatggcagttgctgatactcctatacctttattagcggaagtgttattgcatattatgtctatagctgaactagaaacatttacactgtttcctccctgaccaccactggcaagagttattgtccctccccctagatagataaactgtcccgctgcatctaaaaaaccttctgcagagttgttagaattgtacgtagtattgcttggagttaaaatcaatccatctgcgttgccttgtaaaacagaatatcttaataaatctcctgcccaagtcatattcatatcggcaattctaaaaacagaacgattttcttgagtattatacaactgaaaaccatttatgttttgtgtagcctcttgccaagaacctatagttccatgaaggattgaaccaggtgttgttattctccttgcatttagattatttgtatctatcctgtctgcacttagtactcctgttgtaatttttcctgcatctaaagaagctattattccactttctgcggttatagtattgctggctatctcattagctgtaattgatccagcttgaatctcatctgcggttatactatttgcttgaatactatttgcttgaatactatttgctacaatatcttgaccatttatgccatttccaattaaattcgtacctacgtacaagttatttagatctccatttggagcaacagcgaatactttatctccattgtttaaaatattgactgacttattttttacattatttaatatagatacttgaccaccagttgtaatttttatatttgcataatggtttgtactatctgtagaaataattgttgctggataaatttctgtatttttattttcggataatctcttatcaattatttttagtattacaccagtaacaaactttcttaagtcattttgtgttattgcattagaatcatcagtcattctatcatctccccgtaggtaattcgtgaatattaccactttcacttgttaaatcctgaaaatcagtagtatcattatatctaaatcctaatatactcatattttgagaaaggtctaagggtaaagaaactgattggatagcataataattcttaaacgtacttaaattgttatcttctatagtaaaagctttatttactgtagcgtgaggaagtggtaaacaagttatttcaatagagtcctgcactcttttgtttttttctaacaagtattgagcttcttttaaacaagcagtatcgctttgtagtttggaatcagagatgtcaagagtatttattgaattcaaatatatatttgaacttgaggtcaaatctgtattttgagcaagtccactgtatgtatatccagatgttgtgtcacttcgcacgtatacttgattatacatctgatcaaacctgaacactctttttcctgacatataaaccctatctaatttattaaaattccatataacttctaagctttcagtacttggcatatcttcatataccaatactcccatctcattataataacaatctctttgaaacatgtttcccaaatctttaagaatttgtccataagtagaattattatcccatcttaaatcatattgtgttatatctgctaaaatagtttttaatattggattttttgaatcctttattaaatttaaaattttccttatattatctgttatagattgattaataccaatttgaaaaatactacctgtaactgtctcagaaagactccatttatcacttgcattaatagttactattttattagaaagctcagaagtaacttctggttcagaatgtgctaaacaaaatacgccttgaggaaaaaaaatagtatctccatttgtatcttgaatacctatagaaaatttgaattttgtatttatccataggttaccatttggtgttggtaaaaaactaccatcattgttgtttaggttcatagtaagacttcttcgacaaccactttgatttgttatgtttaaagtagaaccctttaaaggagtttttattatttcatcataaactgattcatcttcttgccttaacatttccaattttacaagaggagtttttaagatacccttttttattatttcttcatatctctcataagacatttgccccatataaacacccctaacttatcaaatcttcaacatcagatacttcttgataataaactgtaacagttggtatttgctgagaaatactatcatcaaatttgtactcaaagcttacaccattagtacttgttgttacaacttttataacttttccatttttgaatttcagatatttttgtttttggttattaataaattttctgaattgatcaatgtaatctgaatcccaagtatattctaattcatcattatcaggattataataacctaaaatactatttattgaaccgctcaaaaaatctctgtttccaaaaataacggaatcatattttgtataattctttaaaaaagtaacatcattattgtttgttactttttcagtagataaatttaaatctaaatggtatgtctctacatcatatacatttccattatctactgcttctgcgtcaattaaaaaataaccacaaaaggttgtattaaatttatcaaaaactataggggcagatatcatggaagtactagctgcatacaaaaaatactggacattttttaatccagcaactttataatctatatagcttgtagtatctaaatctaattcagtaactttatataaacaatctacaccttcctcttttctgtataaaagccatttttgaggaggttctataattcctgttatattacttccatctacagtaccattcattgcagctaagaatactatgtcccaagtccattcaggtaaagaacagactgtttcactaattatttcaatatcactttttaccttttttgagatgaatatactatctattatataccctccataaaattttaaccctgtaaaagaattttttatagctgatggtgtacttagtaatgatgttcttggagacacactattacctattaaaaatccatctcctatagtcaatttatcccacctcactttatttcagggagtctgcacttttcataatacttttgtttagccttaatttcccatgtaaatttaatgtctgttgtgcctttaacagtaaagttagttgggtttctttcttctacccatatatctcccttaccgtactttgtcaaaaatacttggtatgaacaatcttttgtatttactgtttctaaaaatactttgtctaattctattgttgatgtgccatttaccaatttactttcgccaacatctccaaataagcaatctgctgtctcataagcatttaatcctatttttccatagcatttcgtttttacagttctatgttttgcaccagatacataaagatctcctactacagttaatttggcatcagagttatgtgaaccattagagtaggagcttcttataacaacttcttgagctggttgtatataaattttatttggatcttcttggtaaaacactattgatccattatgactcccccaaacatttaaagcatcagaaagtctttttaattgagattctgatatatctgcattatctcttattatatttactaaatccaaaattttttgatcttgtccaaaagctggttttttaaaaccaaagctgtttgttacttccatacaaatcacctcatttgttttcttgaaccataaaatctaatgggaaagtttgcaaatcatctaaattgaaatttttaatattatctaaataattataaatattatattgttttataataaagtgatcagataaaaggataactaaaaaaggattttcagttatcctgataacttcgctatatatcgtaaaatcatttattgtataatagaacttcctattttgactagaatacccaaatttatattttaaatctattgaactacaaattaaaccatcaaattgtaagtctagcttaatagtaaaattaatactacccatggatggaattacactatccttataagttagtgttgtttttgctggcaacgataaagcttcattttcataaaaaataaagttatttataaaagaataatctccatctaatgttccattgtttgtaaccaagctagaaaaatctatttttactccacctttttcatctaattgtgtaacttttggcttttgatttaatttcatctcttcatattgtgtaaaaaatgttccactaccctcaagcttcattccctcgccatttataggattttgagtttctgctttaaaaactactttataagttctattatttaaaagtccatcaaagttagcatttatatcataacaaaattctttatctgtctgttttattggggcatcagcgcattctactatcatttatacaccaccattttttatataaaattgctattttatcttttttaaactgatgtgcctgtagcgtctacccatcctgataatgatttatttgtccatataggtttgtttagtgttgtatcaaaaattgtcattggcattccatttatttcaggtctattctgagtagtacacgctataatcttttcgcaattattttcggctgtatttttagcgtcactagctatagcttgtgcattactagctgtttgaactgctaaggaaactgaatttttcacatcatctatcgctgtttctacatttaataaatctttttgtgtaggtataacaatatttgttccattattgcctataataactttacctgtatctctagttaccatttgaattcgatctggtaacacatcaggaatttcattttcataaccccatgcgcatcttataatatcaacattatttgccattttaattaaccctcctcaccagatttttttattttttcaattaaatcatttatatgtccttcatctagactgtatcttttttcaacacttttatttatcaaatctgtaatatgaccactatctaaaaccgatccatcagctctttcaataatatgaccaccatcaagcctataactaacaggatataaagctgcttgccaactcttaagttgtatattttctgcctgtgaatatgtagctgtaaaagagacttgcgaagaagcaagctgagttggtaaagagagatttataataggggttgtcatattgtaaaaaatcttttcttgagatgtaatagactcgtcaccattccagtaagttaaagtccattttatttcacccttaaaagttatagtattagctgatattttaacttctaaatatttttgattttttgttggtagtggagtggataatgaaacttttccactatcccacagaagagagccatctacgtttttatagaattttaattgatatgaatctatttttataccattaacttttgcagaaacaacgatatcttcacttaaatctacacaagaaccataaggatacataaaacttggttggaaaattgttgccatttaaataacctcctattaaaaagaagtgttagattttaaaacctaacactttaataatctcctgtttcaaccattagttccaagctttttattagttgttttgcatcattcgcttggacatttaggttatttatatgaaagactctttgattagctaatccactagaattaggactatttccattaacatttaaactactaggtaaaataatttttggtgttcttatagacgccattaaattaggaatattctcagcaaaattaactatactttgagttttttgcgcagtaaccacctgatctcctgcatttaacattctcatttcctgaccatattcatttattgtagccaaaccattatcttcaacttttccacctctagcataacccacataaggtctccctgctgctaaagctttaatgcctggaacattaaatatgtttccataatcatgttctataagccttatacctgctgctatgtttgatattggattataaatatcatctggtaaattaggtaaatgccagtcttgcatattctcgtctattagttgcataagaccttttgaggggtgtccctctatagcattaatatcccaaaggtttatactattagggtcaccaccagattcatgttcaataatttgtgttaatggtgcaaaccactcttctccaacaccagttaaagacatggcggttcttatccactctgataaacttccgcttgctgctccaccagccacacctatcgcacttgaaacttgagatttaataaattctgttacatcattatcagacataccatttattaagccctgcattaagtaatcaccaatctcatacataaccctactaggagaatgtatcccaaagccttccttaaatttagttattactttctgagttagatcttgaacaatatttgtaaggttatcttcactactctttactccattacctagttcagtaactaaatctgagccataagaagcacaacttttagaaaaatcatttaaaagttgtgcttcttcagcagttaataggttaatagggtctataacattttgcttttcatcagatattccttgtccaatatttttatcactattcttaccataatttattgtattattaacaaattgagaaatagttttatctatatcttgttgaaatttttgttgtggagttaaagttaattctttattatcggtaattgcatccccaatattttttaaggtattcttactaaaatttgaagaatttttttcgaaagacagtaagcttttagttatatcttttactaaagaaactattggttttgcgttaacagaaatttcatttatatcatttgagctatttgggctaggggctttttctgttgcctgattgcttgtaatagaacctagtttgtttaaattttcattatttattaccattgagccttttggtaaaaattgtttgctagattttacaactaattctggtttaccatcttcaactaaatcataaaaaccactttcaggaacataatcagttccatcaacatatccaccaagtgcttcttctttactttcataagattgatcaacattatctttttgattttgataattattttctatttcatccattttgctttgagcagattctaattgcccatttaaagtgtcttcttgctgtttataatcttgttcctctttccattgatcatattctttttgatcttcatttagttgtttttgtgcttcatatatagcatcactatcagtaatccattgtcctgttgttatgtccctaacagttttttctgtttgggcattttctaatttttgcttatcctcaagaagtttgttttcatattcttgttgttcattgttagattcttgaagggcatgttttttttctaattcatctagttgagatttatacatatctattatttcttgctggtgttgtttttctatcttatagcttgattccaaagcttcatccatgtgttttttttcttcttcgagactctttctctgttgctcttcagcctttctttgagcttcttcagcctttctctgagtttcttctcgttgacgttcagctttttcttcagcttcttgctgttttttttcagctttttcctcagccttttctgctttttcctcagccttttctgccgcatcttcagatgcatagtcaccaatgttatctgaatctactgtattcattgatgagtcagcagcactttgagcttgttcaaacagcttgtcaatttcctttgaagcttcctttagggaatcaatttcctcttgtaatgcttttattctttcttttgcgtttttttgagccttagaagttaaagcttgaccagcctttatctctaaagttgaagcatttatttttacttttgcctttgcagctatcatttttgcttctttagtataataacctatacgatattgagcttgtttctgagtaacagcagtattgccatcctctatcatggttgtagattttgaactacctaattttattttttctaattctttataggtattaccttctgattttaatatttttataatttctttttctttattcccagctttaagagttacatttccatttttatctgttacagtactaagcccttttattttatttgctaaatcctgagcgattttaccaacttgctttttagcatcagctaattctttggatgaacctttattcttacttatttgtctctgtagctttgtatattgctgatattctgctcccaattttgagtaattcttttgttctgccatttgcatttgcgcatatgacataactacagtatttttaaaagaactaattccctgttgtattttactatacaattgtttagtattatttaaatatggtactaactcttgatgatttttttttatatcagctacagattgtgcatcaagtttgttatttctttcaatttgatttgaatacgataaatatgatttgtagctatttgtagtagattgtatggctttatttattttttcttgtgcttgttgcaattccttatcatttaatatagcatctttaactacagcatttccttttataaaggcttcagtatccttttgtagagctgaagcgttttttataatagtgtctccattcttatctgttgataaagttaaatcaccaaatactaaggctagttgttgtgctaaacctttttgcttttgtgattccaaggctgttttatctgattgtttatataaagtaacataggattgtattagctgtcctatagaagtttttgctttatctgaattctctgtaagatctctagcaacaccctcaatacttttattattagcaatttgttcagatgcttctgataagagcttgattttaccagtagttttatcataagaatatccagtagtgtctaaatttttttgagtttcacttattaccttatttactttgtttagttcactttgaaaatctttaagttttcctgtatcgcctaatgaatttccccatttatcattttttttagatttatttacagaattgattttgccttctagttctgcttttctttttaaagcattttctaaagttgattgttccttctctaaatttttataatcgtcattatctgctgtgatagagttgtccttcatggcttttgttaaatcttcatagccctgttttaatttatctactttttgcttttgctcttcatgtttttcgataatgtctgatatagccatagacaaacctatagttaatgcaccaacaataccacctaatgctaaattaagtcccatggtacttaaagtagctgacttttgagcaacagaaagcgcattatttgcagaactagcttcttctgctgaaacagtagtcgctttcatttttatttgcattgcttctaaggcttctgacgcttcttcttctgtcattgttcctgctgcgaccttagcttttaagttttcttctgctgctgcaaatatatctacttgagccttacttaaacctaccttttgtctaataacatctaaaattgttgcggattcttccaaagttatattacctgatgcgacatctctttgtacgctttttacagcagaactgtaagcttttatggaagcagttgattcaccaccatgatcattaaacaactgtttccatgatttccctgttatagcgttagaagcaaaatttaaaccttttattgctaaggctacttgaggaataagcaataaaagtgaaccaaaacccttatttactccttctagagcttgaacaacatcatttgcaccatttacaacggttctaatttctgtcaatccaccactttgaccaagagtaacaaaaaattcttttaccgaagcttcaagaacttttacttgtttttctacagtactcattgcttgagcgttctttttagcagaataaccagcactattggcagattgtttagcgaatttatcaacatctttccaattcttcgctaaaacatcaatccagtcttttctcattgtcccacccaaagcatctaaaatactattgctctgagtagtgttatctccaaatttatcgagtgctgaagaaacttcttttactatatctccaaaatctttaaaatggtctttatctttcattacttcaataccataacctcttaaagtctctaatgttttggggcgttcaagtctattttccatagactttaaagcatcacctatttcgtttccacttttcccagtattgtcagctagcacagcagtaataccatttaattgatttaaactaatacccatatcttttgatgtcataccagctttatctgtaacctgagcaaaatctgcggtttttgccatgctaatatctgcggttttattccagctatccaaaactttttctgagtcagaaaaattaattcctaattgcttcattgatgatactaacaattgaaccatctcattagagtttgtaatttcactagtatttaaccctaatgaaacagtctttgtcatactttctaagtcttttttagcactaacaccttgtgcagctaagcttgacatagcactttgtatacccccaagatcctgtccaaattcttttgaggttctaactgcatattgtccaaaatcttgtagactttttttattactatctaagactctacctaggtctacaaggtttttttcatactctgtattggtgctaatcgcatttctaatttctcccgttactgatgcaataacaacagcagaaccagcgtaagctgctgaaattttcattctatcaagaaaagtgttatttgcgtttcctgatcccattgctaaacttgatttacttgatatctgagaaatactttctgataactttaaatacgcagaactattagcttgaatttgagtgtactctttaagttctgcaaccctttgtttttctagttgctctgtaatcttttgtctatctctatattcttgttctaaacttttatttatagctgtagcttgattctcttcaataattcttcgttcttgttctctagcatttattgtttttgaaatttctgattcaatcttttgtctatctttttcttcttggtctaattgtttgtttatatttttagcttgattctcttcaatagttcttcgttcttcttctctagcatttattgtttttttaatcgccgcttgaatttcattacgagctttttcttctttttcaagattttcggtaacttttgtaactgatcctttatctaaaatttctccattctcattaatttctaagttctttatttcctgatattttctgcccaattcgtctatttgctctgttatttgtttgaatgtgtttgctccgttttttgcttcttctgatgttcctttataaaattttgtgatttttgttgtattcgaatcaagtgttattccaagtttgcttaattgttcttctatattcctaaaaatatctgaatcaaaagattttccagatgcagtctttagcttttcgaattctgcttctatagaacgaagaacttctatggattttttaccactttcaatatctatagagtcgatttttaccttagataaatcttctaagattttattagcctgacttatatcttcttttagtttatttaaatctaaggttaatctaccaataaacttttcaccgttattagattccattaaaaatcacttccttttaaaagataaaattgacattatgtaaaaaatatgtataattcaaaatgagagggaggtaataaaaatgattattctagcaattgttttgctgatatgttgttttttattaggagcaatttttccttatgtactggttttttcaccagcaattataatttttatagttgggataaaattcaattggaatagtgattttacaggactacttacagtttcttttttaataatagagagttttatattttttaaattacttaaaaagaaaaatgttgtaccatatcgttcaaaagaaacagaggaattattttttaaaaaggataaaaaaaccaagtgaaaattcactcggttttttattagataagaggctgtatattttttatatcatttaaagttagcttatgtttttgcttcttttggcttttagataatttaaattctataggattatattcctgtattattttgactgcatctttagcataagaatttcctattaagccttttatcccatcatatcttacttttaagcttaaatcaacgatacaatctttaaaaaatacatacgaaaagttatctatttctgattctgtaaatccacaatggactccaagtaaagaataacctcgtctaagagttattccttcatcattggagtccttttttcgttttttttctgttcatcatcaatttcatttattttctttgtttcttctagtatttctttgagaataggactgttcaaattatcaattaattcttttggaagctcttccttatcaaaaactgcctttaaaaaatttataataatggtttccccatcaacaaatttgcttacaagatttaaaaaaccatattttttaataagcaaataatcagcataaaagttctgttttatatatttcatttttacaggttttatctcgtattctttattacctattcctattttttgtcccatttttttcctcctaaaatattatttgattttatatgtataaagacaaggcttataccttgtcttaagatgtggcagtagtaaatgatgttgtgaaattgtctcctaatctattccctgctaaatctgtaacgtctccacttactgttgctaaatactttgtagcagtatttaaagcaacattaggctttaatgttacagtcattctatcatctgatagtgttaaagtaccctttatatttgaaccatcagtacttataagagaaaatttagatagagttactgtagcaggatcaataggctcattaaatgtccaaattatatcattagttgctgaagtggatttatctgctggaactactgataatatagctggaggaattgtatctacagtattagaaattggcttaaatctaatatcatacatttttttatctggtcttttaggatcaagaccattaatttgtacatcaaatgttgatgcagtcttataattacctccaacctttgttgattggagaatctttgctttataaattataatttgtaaataacctgtaatttcttgttcatcttcttcgcttccagcataaacagggaaatcaataataacttcccctgattttgggaaatcatctgtttgtacagataaagaagtaatattgtctacatctatagtataagatggggatacaattgtacctttatcagaaggaggtaattcaacaattgttgaactttttcctatactaactttaaattgtccttctccaacatttccatcagcaatttgttcatatccatttatccttaaagaaccatcttttacaatatcgtttatagtaatttttccttcgtcatttacttggtatgaatctccaaaaatttcaaactcgctttttccttgtgatacactaccaccacttgcaattgcaagagaagacatattcatttctgcatctgtgaattttcctgttatacttttgcttttatctatttctgctaaattataaaagctccatccacctgttacctttaatgtatctcctccaaaagttatttctccagaagtagctgtaagattagtataagtggctctggtttttcgtgatcttatcaatacgtttggagcatctgcaataaaacctgttacatttttttctgacattaaccttcctccttaaaaaataaaagtttatgagttaattcccataaacttttttatataaaaattgaacaaacatcctagaataatttggtgtactggatggaagctcattgtgattttctaacaaaaataatttttgtgcaactcttttattatgaattagatgtataagcctatcaacaattttatttcctcgtcttttaaaaaagttattttcatctctatcaatttcgtttgggatatatatttctataactaaagtttctcttttaataaaaatattatttgtgcttaatgagggggctgcataaaattttattctacatgaatcatttttggtaataggaacatatgaaattttaccttctataaaatattctgtaactaactttccatagttatcaatatcttccgttggtattttcattaatgtttttagtcttaaatcatttgttaatagttttgttatagaagcataatcttctgttatacccataaattcaatcacttcttactaacagatagtccgcaaaatttactgaattgatcgcatcaagaatagcttcattaaaataactttctgccaatccacttgaagcaccaaaaacatcttcccaaaaatgcgagccttcttgtccttgtgaaaaagctggaatttcatagcgactttttgcacaactttgtttccaagcgttttcatcaggatcaaaaataggttcatttggtctgctgtaaattttcatattgtctcttgttttattataataacttgaattaaaatattcttctatgtaaggattattttctatatctgctttttgtcctataccataattctctaacatagctttatatatagttccttcgttttgatttaaaatgcctatttctcgcacaagagcatttgattttacagcacttctaaatttaatggattgtattacatcatttttccattctggattaccagcattagattgatagatttctgcaacaataaattctattaaaattttacaaacatcatctatttttttgtttaaagctattactatagcgtttattagtcttttttcatcaattttgactgtcataatgttatactcctagctattattgttaataaacctttattgaagtttatatcaacttgtgaaaaattaaatgaacttatttcatatagaactgtaccccaatataatctatctccaattttcaatttttttgtataaaaattaaattgagtttgaattgatatttcattacttgcttcaagccctatagaggtactatttgctttgaatgcaaagttctgagaatcaatagagcataagaattctttttcaaaaatagaattccaacctttctgttttaaaattgtaccattattatctacagttgcttcttgaagccttaaaaaatctatttttgaattaataactgaggttagaattctatagcatctggggaatttttctatctttaattgtgaaacaatataaatctcatcatcacctgcttgaagataatctccaaggtttaacttaaaatttatatctgcgtagattggttttgttccttttgttgatgaaccactttttagtctatgatctacttctggtactatagctttaataatattctgcgaatttgaatttagaatgaaagaggttgctataggtgaattcaaagaatcttgaaaattttcatttatatgaggtggtatataaaagttcaattttatcaccttcttatgtttttgataagctaaaagaaaaacctatatctaatagtctattttctaattcttttatgatttcatttaaatttttatatggtttatctgcattagttatcgacaaagcatctgttgtataactaacaatgtcaatgtaattactccttgcacacttaaaaaagttaagttctgaagagatttttatgtattcttcttcagttaaatttatatctctagaaatttttatatcaataatttcttctgaatttatattttttatctctttacactctactttaaacctatctccaatacctttatctacatataatcttttaagcccattttttagataatgccaataatctatattctgtaaaaatatattcatttcttttacaaaaggttttaattcttcttctaaatcttgttttaaatactctaaggaaggcaaaacactacctcctttatttctcttctttagcagaattatttttagatgaaatatttaattcctcaacatctctgttacagaaagttgacaaatattttattttactagcagttaaattttctacaacttcttttgctgtatcccatatagtaaactttaattcatcttctgtaatattatctaattcttttttcatatcagtaagagacatatcaaatatcttttttatttctactggagatagagacattttctggtttgtattatctccaaagatctcattttttttatctttatctaaaatttctaaacttttgcctaaaaatatagttgatacagcattaagataatcgagatcttcttcctttagagagacaactacattaggttttatattcatacttctaattccatctaaaaacttaattccaacatcatgctttgtggaattttttacttttatttttttttcagtattcgccattatattaactccttctttatacaaataataagtagagaattaaaaaaattctctacttagattaagaaatagaaagatctttatacgctcctatatagcatttatctccaaatactaacccagcaccaaaaacagcatccattctcatctcgtaggatctatcttctaagtggagatcatctatagttggaattgctttttcttttgctacttttagggatcttttatcgttttgacctgttgggacaatatataaaaggctcttatctaaaatagtattactaaatgatcctgatgaaaatgggtttgtaagctgtatgacattacaattattataagttcctataaaaccatttttattttgctcatttataagcattggatcaaattgctgtgttactccattagaatttgcagtaacaaaaccagttaattcccctagttttgaaacaacttctatatcaccaactaaagacacaggcataccaagtctttgaaaagctcttatttgagcatctaatgtagcctttactaatcctgttcctgttgcataatttggattagacaatgtactaatacccttttgtaaaacactttgaactctagtaaccattctattgttcatctcgatagctgcatcctgaaccacttcctgaaaattcactctaccacttctcatatctatatctgatatagttggtattgcggtaacagcttcggtatcaagaagtacatttttgtgagaaattgtgcttctttctactgtactgccttttgcacaataaaaagctctaactcctcttaatttcactttgaattctgctttttcattaggctctaaatctaattttgtatcagctataagatttaaaaattgagtttcctcatcaactacattttccacagaatattgtacaatttgggcaatcatatacctattttgaggagtaggattcattgcaagtttattcattattctgtttgcattttctaattccactctattttttaattttccttttgccgcagcagaaaatattctaactgcatctccatgtcgagtaacttttctttctgacataatcatttctcctttatatgctaattgctataagctgaaaaattaatttgctatacaacaaaaagttttttcaccccatattgtttctatagaatctattgtaaatgtttgagctggtgtaccagatgttttagtaattaaaccagttgtacctacatctacaacgtctccttcctttagggaatctccatcaaccgcttttgttgtttggaaatgctcatcaggtaaaagtttatgcaatctaagtttctcacctgcatttattgttaaatcatgatcggttttatttataagttcttcatctgttttatcatttaaattttcaacaaaccatgctgattgggtattagaagtacatggttttgctgttttatctgcaaagttaacacaaacaaaagaaccattttctacaccatctttaacactactatctaattctattgtacctaaataattgtggttgcccatagtaaccattcctgccatattaaaaatcctcctaatatttttcatatactaattgttataagatgctacttgccaaaaaaacttaccatataattgtcacttatggatgcattatctgtaatacgagttcctagtggttgtctttcgatattctctgaagaagctaaagcttctgctacaactattttttggagagtatcttcgttacctttctctaaagcttctgcaacttctgactttttcatagtatcttctgaaagtattttctcatattttgcttttaaagctatcttcttctcagctaactctttttctgctttatctttttttaaagtttcattttctgcttttagctcttccatatcttttaattttttatctttttccaaaactgaagctgataaagtacttatttttttattggcttgctccaattttttttctgcatcttgtcttttaactttttctaactctaattttgcagctatttccgcactagacatttcatcatctccctcatcatctgctttatctttttttgaatccgaatcagtttcttttgtatcatttaacttctttttaggatttttctttttttctgccatttcgttttcctcctcattttcaatagagtcatattttatagttactggatagacatttaaaattacaacattatctccatcaacagtaaaatcaattcttactaaagaaccatcatcataattctccattacaagaaaatctacaccatttgagaaaatataaaaattccaatagcaatcacctaaattatcttttaattggcttcttaaactcagcattacttgattatagtttaattctgcaatctctgttcttctataagacttttttagttctgcaagtattttctcttcccactctaaagggttaattttttttaccatttcattctcactttccttaatatttaataattccgcaactaattttgtggcttttgcagatacaacggcaggagtactaacaattgaataaccactcaatttatttgactcgtcaacatcaacaaatttaatttctccattattttcttctgtatatttcccaacgagaatttcgtaacttacaaaaagagcttcatcttcatatagttgttgtataatgtcgcaagcatctttaaattcttttggtattcttacctgaccagctagctcatatatatcatcatcacttttagtactataaaatttaacaaatgaacctatcatctgattataaaacttatttgttattggagaataattgtgggtaagattttcagtattaccacttactaaattattcaaatcaaccttaaggggaagtcctacatattcttcttggttatcaactatctcttgtaaaaattcttttgaatatcttacaccatttaaattggtattagtgtcatttagtagaaaatctataataagaaaaagatctgaaccaacttgtttctctgcaattgaaataattcttttgcttttgcatttaaatttttcaggcaaaatttcaccttcttactatatagtttttaaaaataaaaaagccattttatataattttactattaacgaaattttaattcgatactgtgctaggctttggctgcttaccagataaacttttatctttatctgaattttcttcttcatgtcttccactactatttgaactttgatgattaaatgatggtggaacagagaaaacaatatctaaattttcactattttcactttctcttcttttcttttcttgcttaaaatcgaattttaattcagataaggtcgtttctctacttaataatccaaaagtataaagctgcataacttcacttctaaaatctttttccgattgtaaatttagggattcaaatttaaaggaaggaattccatccgaagtactacttcttcctgaaaattttctttttaaaagtaaatttataaattttgcaattttgttttgaccatcttttatccttttcgctaaagtactaagatttatacttgcctgagcaaaagaaccacttccaccatttcccgtaacaactatagcagatataccaatagaactaagaatggattcatttacagtttgatatttatttttatcaaacagactttttgtatccatatttttccattgagagtctacattccaagatacaacagcaagaggataaccattaattgcatctttgtatattttcccaacttgttcaatatcatttatatttatagttttcttatggtctttatctccaacatttacttgaagaaaagatttcattccattatttaattgactatcttcatatatacttataagctgttttttacctaaagcttctaaggcagagcaaataacaggagttgcatatttgctccatctactttttacagcttgtatacaaaaagtatgctttggatttaattgaatccatccagtaccagagtttgaccaatttttgccttttattgcattaacaacttctattgggtaaccatcataagctttagaaatagtgtctataaactcttgatttgtaatagaatatggcttattaagtatctctgttatgctaaattccaaaacaggatttccgttttctgcgatagaagatacctttattctccaaggagcaaaaagttctggagtaccattttcttttatatatccaaaaagattttgatatacatagaaatcatgaaacaaatctctcaataaatcgtctattgatatactatctaaataatcaagcatctggtcttttatttccccatcttctccttctagtttccagctactcatactaaaaggtacaagtacattttttaccgagttggctaagaggggttcttttgcataataatatgtgcataactcaaacaattgttttatgttgctttcttgatttagcaaaagagtatctatagaataacctcttgggattcctctataagaaaatgtactattttcatatgtcctaatgttttcaatgtcgtcttcggctagacttgctccaaaacaaaaattattacttatattgtttttagatgtttttcttttacctatttttactcctcctttactaaaaattcatacttctaccccaacagttatctccgctattctctgtagcatctcctctgtttttatcttctaaactaaaaataaaatctaaagccatagcaagagaagagtatctatccttatgctgagtgctcttttttacatcatataaataatttcctgctgcggttctaattctaacaatattccccatttccatttgtaacccatcagcttctatataaacgcctacttcttcttttgatatctttctttttgttccagtatcatcttttattattattttttgttcttcaatctgtcttctgatttttacagaaggtattggtatatgaagagaatgattttctaaaaataataaagtgtgaactgccatattttcatttttcttattatctgcttttatagcactaataatatttatagcctttcgtgaatctgaaacttcgatagtatcttttattaaaggaggatattctcgtcctaaatcatcaacgtaaggtatatttaatagggatactacaccttcaccaattgcattagcatctataattacttttatgatatttgggaacctacaacaagttatcctaacttgctctgcaagcatttccaaactatagccatgataagttcttatgaaaacaatatatttttcataagttccatcatttttaggaactatttttataacagtaatacaagcgttatctgcttttttatcttctgatgttgctacatcaagagataaaacatacctagacatagagttcttaggttgttgtatttctacatgggaaaaatctctacatggttctgttaaatcataagggaaatatgaaccttcagtttctcctacaaatttagagttccattccatttcccaaacagataatggcattttctttttctgttctaaaacaaaatcttcttcaactatgccacatcttacagcggttttatacgacagagcacaacaaaaacgatctttgtacccatctctaatatcttgtatggtttctttaaatcgttgataatagtcacaactctttagatacgctgaacttgtttctattaattttgaagaaaaatcttcaaaagcaagtccttttaatctattattttcaacaacttttctattatatcgaagcattggaattaaaacagactgtataacgctactcataacccaagctgattcatctatatagattatcttccttctttctcctcttatattactgccatctttgttcatagccattgcttcaatttctgagccatttttaaattttactttagctccatctttgcttattttaataggttgtattatttctctagcaaaattggcattttcttcacctaagtcgttaatatattttacagttaaaatagcttgtctaactgtattagaaacaattagtattttattttgaggatataaaattgctagccctgctaatactcttgacattttgaaagtttttcccatagaacgagcttctgtatctcgaactatggagcaatttccacattctcttactataactttttgaaaatcataaaaccttacaggagatttctctgtagaaaaataattttctatgaaaatatccaaatattgtctccaccaccaaacctgcttttcccattcttttgggttttctacagtgttttctttaacaattttattactttcagcagcagaaggatctttatatacccctttgttttctttgtatattttttgagaaaaatttttcatttatccatcaccaatgctatttagtgtccacctaaagtctgctgaaattttgtcaacatcatctggatcatcaaatataattttctttgccaaatatccattttgctctaaattaagaataatttctcctaaattatcaaaaccagcagaatcatttatgcttctggttttttctgagaattttgcagatgtacttaaactatcaaaaatagcttttgcttctttataccttttatctgctccactaataccattcatcatgtcattataagattcatccatgactaaacttgctttagcaatttttcttgcgtaatctttatggtttctggtaacaatattaaagtcttttaaacaatcctcgtaataatcatttaagtaatccaattgttcttgagtgtatgttcctatccatttttgtgaatatattttcttaggctttttatctttttcttttacattttcactaatagatctatttataactatatctttttttaataattctttatcttgaccttgatcataagagtaataatttactctattcattgaaccaaaatagccctttattgttttgttcaataaaaaatctttctgttgtttagcagaaagattttcgaattctaaattatttttatatttatttttgattttttcactttgagtactccaaagatcttctttaaatagtcttctatttttcttgcaatattcaattaagctatttttgtcttttacaaagcttgacacacattttttacaccaaaaatcatgtccttcatttgttttatttaatttatttacataaaaagatgatagtttttgtcttttgttacattttatacattcggtaaaaactgccacaacatcaccttttctatacattttttgatgagaagggtaagaattgaaattacaatgcttttgcgacagatttacaatctgcccatgttccatacatgaatatcttctcatataatataataaaaaaatagggaagaattaaacttcccatatatttttaattaaaaacaatatcttgaatacttagtcttttgccatcctcataaaggaatagtctttgtccagctttgctaaataagtttttgtctttagcatattcatctgtgccagagaaagacctaccaataaatatctcaacgcaaatattttcaaaacttttattttgatgaaaatgccccaaatgaatttcatctggctttttaatcatcatacttaaatctccagcgattctatttacttgtccattatgaccatggcactcaaaaattgtaactccacaaatttctttaactataattccatcatcataaaaattatcttcaaaaataacattctttaaattctttaaaccttttttaataccccaataaataagatattcgaaattttctctatctatagaagaatctttttggggaatcattcgaccatgattcccaactacagatgctacaacaactttatcaaaaacattagaatcagcaaattcagcaatcattttttctaatatctctgctaccacttcaacttgttgcgcaacatctatttcttgttgcaagtgtaaactttgatgaataagtccactaataaaatcgcctaaacagcttaagtgtaatacattcgctcctgcttcggcacacctttgtatcacctgtctggttaaaaattctgctctcttttttgcttcatcaacagaatatttattccagtagttattaatttttattcctaaatgtaaatccattaaatcaattaaagcttctctatgcttgccaattttctttattttagcattatatttattaggtgttatgactatactattaagtcttttaactacattattaaaaatataatcttctcttctgtagtatcccaactcttgtttcatctttctaatttcttgttgctgcaatttaatgaaatacttttcttttcttctttctaaagtcgtatcaacaagactgtctatattattatctgtaatatcctgatccaaatatggcacatcattatgtactatatttaacccagtcttcaccatattaaaatctcttctaggaatattcagttttctgcaaacctcatttatattcaaaggattatcatcacaatataactctttgattttcttaactttatctttagaaattttaacttctctcttgccatcattaaaagttaattttgtgccattatcaaacacttgaattttgtcctctggattagataaacaactagaatatccacataatgtttcaagtgttttagaattacttgaaacattttcctcacctttaaattctttaaattgtctatttttatcaggtaaatctagcaaaaactttttgaattggctccatccatcttcacctttaagttggaagtattctaaaacttctctccagccataactaagttttctcaaatgtgttcctgatatgcttaaatccagaaattcaactatatcttcccaatcaacatcaatttctttatctaatttagcactattaagacgaagcttataaataaaatcatcttcatctttatgctgtgcaaatttatcatctatttctaatccatttatattcacaagcttcacctctctttattaattaaagcgtttctttcctttgttgtttaaatacaaaagaaacattcttaccagaaaacatatctcttaatttagagaaagaaatattttttgtccctttatcatctttaaaatcaaaacctgtatcagttatagtcaattcacctttgccttctattttgaaatctgttgttctttcgctttttaccataaaataaaacctcccaaaataaacttatgtatatattatatactaattgtcgtaagtcgaaaaatattcaataggagaaatagctttaaaaaacataaaagcaattcctgacctattgtattttaataaaattaaggttttttaagcgttcccctttcagaacaaacgaaacttttattgagttaaaattcaatatagtaactctcacgtttcttggtctacaatgtccagtaggctgaccaaacccccttttaaatgatctattccaaatcactctcaggtagagaattatctttatctctaccataataccacttttcaacatagctttatccctttattcatgcggtgttcaaaaaaaattacaatgattttatgcattttttagacattctagcaatacttttttatgagttacaaacaaagtacctagtaaaagcattttgtaatttttaaaatcatctaaattgaataatataactctcattgttggtaaagttatatttttatttgacattttttctattaatccagcttttacccaccttattatatttttggtttttctttcactttctttatcattctcacaattcattctcgcaccatttatttgtttttgagctttttcaaaaatcttttttatggaatttatttgtgtatttgcatacccccttgtttttatacttttacaacagatatcctctatctttattagctttgtatgttttccacgaggaatatcgtttattaatttatttaaataatccattggggtatccataaatttaaaattactagatttagattgaccagcatatttaaaaaaagcagggcgtattattttttgagtatccttgtcttttataagaaatttttgagtgtatatatgttttagcatttttttcatgtcaacatcatataatttttttgctttgtcaatttcaatctggctcatgctagacaaaatagaaatcgaattataaatgtgttgttgcatttttatgtttataccattaaatttattatgccagtataaagaatttaaaaattgacttaaattaattatttgtccaattagattttctgatattgtgcaatctacatctacaatatcttcaacaatatattttcttgtctttttttttgcttcaactctatttactggtatattatactttccaaaacatttttttgctgaattcaatattatcttattattggttagtaataccgtatcagaatcttgatctgatccttgcagggtatcctgcaaagggaagtctattaaatttactgcaacaatattttctgtgaaattaaaatatttatttaatctccaatcatatttattctttaccaataaaacattccctgaacaaacatgaggatttctaaaaccaacaatttcttcgctatctttaaataatggtgtataaacttccccatcagaaaagatacatttctttggattatatttacctattgttgcttgtagcatttcataaggatttccaactattgtacaataatcagctttttgtatcttgatttttcccaatcttaggttattatttatataattttttactagatatttcctataatctttaaataattttgtatattggaaattatcatttactgaaagagcagcacatataaataatccgctatcttcgcaacatccacaatatttcttgaattcagaaatgtcatttcttaatttttttacataatttatttcatcttgtgctaaattttgaacatcattgaaattaagaggtaagctgttaatatgttggtaggctaatttatttttgccattattatatttacttttatgttctgattttacaataccgaagacattagaaatatgttttttccaatattcaaagcattctctttttgaagagaatttatatgaaaatttaagaaattttaaagaagatggagttataatcatttttatatcttttgctaaatgttctacaccaaacatatctttaactaaaagaatattattatcttcaaagaattcctgtatgtttgtattgaaaccacaagatttaaacatttgttttctaagtaacatcattcctttatcttttctaacagccttttcaaaaatagacttatctactaaactttgtccatcaaacaggttattaaataattcaatttcttcatcttttgcttgtaataagccagtttctttatttaatcttgtaacactacatcttttgaaaaatttactttcaatatcatctattatcaaaattgactcaggatcaatttctataatgtcttcaattgaagacagtggtaaactttcatatgcaaaaagggaaggcaaatcaagtatttcattttcttcaaaatgtaaatttaatctactccaatttatcatttttttatataatttttctataataaataaacaatgtccttttcgagattttgcagtagttcttttataccgtatatactttactccattaagaacgaaaccattttcatacaattcttttcttagctgtcgtttatttctaatgacattattattactatccttttgattcctagaaaactttatatctataataacatcagaaacttgcctatctagtatctttaccgatttattatatatgttgtatagatatataagttctagactataatcaagagaagctagatatttttttgtatatatatcctttccaaactccatatgattcatgactaaagaagcttggagggagtttatataacaacctttagttacatcaaacatatttttcattaaatccctccatacataatgatacaagtcatttatccaaaattatttaaatagtcgtaacataagtctcgtctctaaagatggtgtaaataatccatcatcagaatgttcagtttctcttaaatggtgacagggacactctttgtaaatattctttttttctattataataagttttggagttcgtcttaggcattgctgatccccatcatttaatatgctaccagcataaacacaattagaacaattacatttcaactttctcacctctggactccatttcttttatgaatttgcatgtgatattctttacttcatctaatttgtttaatataatctttatgttagtattctcttttaatatctcagtagatatctgatctattgcgtatttcaacttaccaaaatacaagcaatctatccagcgttcatttcgatttataatattgtagtcaggtgttgcttttgaaggttttccacctcttttttgtagaataaaatttctttcatctgttcgtattctataatcttttccaaactctaaaatcatttaaaatcctcctaatattttctatatactaattgccataagtggtagaagataattctttcttaaattgttttttatctacagccctactttgtaagcctacaccatctctatactgacatataaaagaattatttctgccaatttcacttaaataaagattctcaattgctctagtagtagcaacatagaacaatctggcttcttcattcaagccatttcttgcattgggaaacctagtatcttgtattccaataacaaaaacacttttccattcaagtcctttggatctatggatactcataagctttactccatctttatcttttttcttaatattcatatttgatgtttgtacaaaatctataaaaaattgcaaatcatcatttacaatgaaagatttcaaaacgtctattgaaccttttctttcttcttgctcatctttattgggatatttttcttttatccattgatataaattaaattcttttactatatcatctattaattgctttatagatactttattcttatgttttaatttctcaatgctttttataaaatcatttcttgatcttatttgaaacattttattaaaatccatttttttaaaaatctcaaaataacttttattttcttttactgattgcttccttatatctgataaaattgtacctgacatatattttaatggaatatttcttagattccagacatctaaaaaagctccatcatcttttgaattctgaattaatcgtaaatatcccataattccagctatttcttttcttttaaaaaaactagaatcattctcaatataataaggtattttatctcttcttaaaacacattctaaataacttgagtcatcatttaaccgatagagaacagcgatattgttaggatcttcaccttttgttatcttttcttttattaaattagatatcttttcagattcctctaacttattcacaaaagaaaaatattttatttctccattatctttaaagtttgctatgctatctgaataatatttataatctttaaaatacggttttatgaatttattacttttgtctacaatgttttttttagaacgataattaatatctaaatgaagtatttttgccccattaaattctttatcaaaatttaaaaagaattgaggactgcttccacgaaaactatatatcgcttgtctaacatcaccaacacaaataagattcttggaaattagtttgatcatctctatatttaaatcattactatcttgaacttcgtcagccattacatatttccatttacggggatgcttttttaacttttctaaagctaaaataatccaatcttcaaagtcataacagttttctttttcttttaaattttcataaagtttaaacatagctctaagctcagtttctgtataatctgtttctatcggataaaatttatcttttggggtttttccatgatttttttgaaaaccaatccacgataaaattttttctgtctcaacattagaatttattttctcaaattctttttgaatcttccaaactggtaatgtttttgaaacattcaacccatattcgctaagtatcttagctgataggctgtgaaaagtatgaacggaaacgtcataaataaaattttcttctaactttttttttagattattaactgctgctcttgtaaaagaaattagcagaatatcactttgtggaatattcaaatcatttactaaatgaattatatgttgaactaacgaaaaagtttttccacttccagcgccagcgctaacacaataaataccttcgttaaggtttataacttctttttgctgcttatttatctccatctttaatcctttctttctaatattatatatataataacatactaactgcaataagtcaataatcaacttattttcaaaagttctcctaaaaaagtgtttttgtgtgtaacttgattattatttagtgcaatactaaatgcttttggatcacatataaaaattaataattctacacatcttgaagcagcggtatataatagacttctttttaacattttataatgagacatatctaaggctactattacaactttagattgagatccttgtactttgtgaatagtcaatgcgtaagataacattaattcatttagattagaattatcatattctacaatacctgaatcataagacacgtataatttttggttttctaaatctattttttctattttaccagcatccccattaaaaatacctttagctattgtatctttgcaatcttcactaaatatatttgcattataatcattttttatatgcataaccaagtcttcttttttgtatgcacaatcttttaattttagttcctcagtattttgagaatttgctattttttgtagttcttgatttaatttatttacacctgaatttccttttttcattggacataaaaccattatatcctcccttgaaaaatgttttaaacattctttatagcaaagtaaaactcttgataaagtttgttcttttttacccaaccaaaatttacagtctcgtcctaattctaaataagttttgtgagtattttttaaaggattatctccattccttatatttgtaattacatttaataaagaactatcctccttttgtctaaaaattttttctaattttacacatggaattcctccttgaatcatgtcaaataatacatttcctgctgatatgctttctaattgtccataatcgcctaaacataaaagttttgttgtattctttataccttttaaaaccgctaagaataaatatatgtcaaccatacttgtctcatctattataatcacatcttcggcaaagggatttttttcatttactaaaaattttccttctgctaaacctaatgctctatgaattgtactagcttttttacctgtgcattcttccattctttttgctgcctttgcagttggactcattagcttatatgttatattttttttatcaaataaatttagtaatccatttaatacactagattttcctgtaccagcaaacccagttaatactaatatattattttcatttattttataaaaaagttctttttgcttatcatcatactttattcttaaaattcgttctatttcaggaatcaaatgtataacattattcgtaaaaagtttttgcgaattatttattttttcttttaatcttactgaaatgtccttttctgtttcccaagttgttctttttgctaatcttaaaacatcaaaataataatattctttatccaaatagttttttatatcatttattttaatattaagtagcttttcaacttgctgatgaatatcttctataaaagcataagtgtcgccattctgctctttctgttctaaacaatataatatagctgctttagttcgaaaattactatcaggttcaatacccatacttaaagctatactatctacagttttaaatccaaagccttttatatccatatacaacttgtaaggattcttattaattatttgtaaagataattctccgcccttataaaaatctataatttttttcatttgattaaaattaaaacctatttttgtaaattcagaataaaaattcatgtattctaaattttttattatttttttctttaaaacttcaaaatatttttctttaatacctttcactttacttatattaaaagttccagaagttatagcagttataggagacttataaatttttataatctcttgatattgatttagagtaactatattctttaaaaaattcctttcatctgctgaagagtttaattttttaatttcaacattttctatctgtaattgctgtccatattttttatgaataaattcaaaccccataactttataagctttgcctaattctaaagatggcatagtaccgcttataacggtatttttaggattaaaaacatcctgtttgtcttctatggtacatgtatatataccaaaattgtttgcatcattgtagaataatttcctaataggtattatcgtaaaagtataatgctgcttatcattattcaaaatatcatatcctttcttggctatttaaaatcagctaatagtattctaaaaaataaaagttggctatttaaaaatatctatatttatataatatatatttatttattataggtatctttaaatagccaacttttatttaatataaaagaaaacaatataaggagctttcttttttggttctttttctttggcgaaggtctttggatttatcagctttgctggaaatacaaagagatggttcaaagaaaaaagaataaaagttaattatttaagataattaataaaattcatattctttattatttattaagctttataagcttttgtattaactttatagtattttcaatatactcttcagattcttttatttcttggtagatgggcaaaatttgagttccccattcattatttctctgttttaaaatcttgttacgtctaaccttagtgtttttttctattctttcttgaattattaaatttagacttttctcaacttcttctcgtttatcttcttctaaggcttgtattatatgatgtttattactaattattttgtatatagaaaaatagtattctgtattttcaagatcgaattttagcttatttattacttttaaattaaatattcctatttgtttttttaagaatacatctaaaacagatttacaattcatttcttctaaagtgtttttttctgcacttaatatttctttaatttcaatatcagttgctaacctatatttacatgtattgttttcatcaagataacatataagtatttctttagagtagaagataagtttacgtttttctaaagattctaaagatttatttaaagcattttttagcatttgataactatatttataaaaatcttcgatatatgcttgatttattttcatttcttttgataattctttttttgcatttttaaaatatatataatctttatttatcattttaagttgttgtaacagcttactaataggaatcagcaaagttccatcatcagttccagcaagtaaacaagttattaacaattgtagtttatcattataaacagaattattaccattgtgtctattatcagatagactttttttatgacaataaattttatcaataataaaagagttcccatctttatgataagaacatagagattctaattgcttcaattgagcttttttactacaaccactctttattttttcatctatagtattacaaagggctttataagattttagttgttgaccttcatataaattagatatattcgtataatcatctcctttattttttctatcatgttatcatactaagtgttacaagtcaaataaatacaatttaaaagatttaagatatcaaaattaatatcattaatttgaattacggaggaagttagatatagcaagctattaggaaatgttttttcaatgaatatattaaaattaaattacggtgaaacaaaatagtatcaagggttaaagcgtgattttttggattaagcaaataaattagcaaaaatattacggtggaaaattacggtatgagggattagaatttacggtgaaagggtattaaaaaaacaaaaaagttagaaaagtatataaaaaattaagtatgtaaaaggatttagagttttttcccgttttaattactgtatataatattaaattttaactgagtaagagaagagactaggggtggggaaattttgaaaacccgaaacccgttgaaacgtaaagtacccccctatgtagtaattcttgcagcaaatagctttattttcctacgatcatgacaataaataattcttaaaacacattgatattcttagcgtagagggtttgagtgaaaaacattgaattaaatacatatttaatctaatgtaaagtaatttcttgtaaaaaaagggtgttgtagtcagaaaatagctatagttgaatctttatgaactaatatttgttattagttaatatatttttttgtttgattactttttcaaaaaaataatgtttacttgtttttattaatagtggaataaaaaaactatagtattttttatggctgaataatacatacatattagtactatatattgtataggttcttaaatttaatgataatcttatatctaatgatatacactataatatatactataggttaatatactattgatatataaatagattatgactatatattcagcttaaaacgtctataattgatttttaatactatagtagtacaattctatatcaaatataaacacgtgttaaatagccttatatgagtatatagcagtattacttataatttataaatagcttttataggcgacttagtaaacaaacgaaaaaggcaggtatacatagctaatttaaattaatgacttataacagttagcacaataagtattcgacctaaaatacacattgaattaaataaatatatattgtattatatacatgtgcttgagggaaacaacttaaacgacttacaacagtaagcatataacaataacataaaataatagttaattctatacagtaatacaatggtagcatacaattatttacatcaaattacggactaattaaattgtaaggctcgattatttcatcaggtcataacgcactttgaaaaataagtatattactatgcttcatataggctacttatactatgctatatcgtggcgattattatttgataatggtcatagatatttaaaagtgtataacactagcataagaaaacaccttggaaaataggttggaagggtgaaaggaatgcacgatttattacaacgaccgttttataactctattggttcaattacttattctatcgttgtttgtaaattttcaattgttaaaatgttattttctatatttttaattttaaaaaactatgacaaaacaattcataaaagaatatatatagtccttatatatccatgttctttaattactagaatgaaaaatatttttaaaattaaactaatacactattataagattataaaaatgacatctaaataattatatattaccttatattttattgtgtaaataaaaataagtttaaagtaattgatattatatttgtaaaatcatgctgtaagtgtgtgcatttttatagtcttatattctaatttaagaatatattaacaggtgtatttttaaattagaatataaaagatatttatattttatgatataatacataagtaaagagggtgttaaaaatggaaaatgaacaatataacaaacttctaagtttactacaaggtatgtatgaaaatattgtagagaagctagataatattgataagaaattagatgctattgatgaaaaagtaaacgaacatgagagtaaatttaataagttaaaagctttataaattcttaagaatagatttaaaatctattctttttattttgggtatttttatatagtatctaaaatcagcaaaaataatgagatagagaagaacgtttataaattgtattgaagtatataattaattttatatacttcatagagtttataaaaactcaaaattaaaacaacttaaattgtgggatacaaaatcccccgtattccgcaattgcttttttgtaaaaaagatgatcttaaggggtataaatatatacatatattattaaaataaaaatggaggttattattatgaatacttttaaagaattatttaattttgtaaagacatatgataaggcggaagataataataagatgacaaaaaaagaacaaagagaatttattaaaaaagaaattaaaagaataatggaagatgtattaacaaaaagcattacagaagttaaaatattaagacgtgataaatttgggttcaaggttaaatattttaacaatggaatgggtacagaagattatttaaaaataacttttagtatggcaacatataaagcttatgtttatgatggaaaaatagaattagagtttagagtattagaatagtccacttatgacaattagcattaaaaataaaatataataaaggagttttaaaaatgaataataaatacatagaaatgaaaagaaaacatcaaaaagaggttaataattttccaatgttctttgccttttctaaagaacaattcaaagaaggtatgaaaaaattaggacttgaaccatcagaaacaaacaaaatttataagtttggaaatactgggggtttttataagagaacggattcagccaaacttaaaaaaatgcttaatcgtcatgataaggaaataaaggaagctatgaaaaatgatacctttatttttgatatgttctattatgaattaggaaatcatgaatatagtatcacatatgaattaggagacacgctagatagtttaagtttgacatatgaagaagtacaaaatgataaaaggttattaaatgctttagatttagcaataaaaaaaataatggaataggacgaatcaaattaaacgtcttatatcagttagtatttgaatagaaagaaggataaaattatgataaaaaagttagctaaagaaggtaatagaagatattttaaaatagagaaaaagggtgtaaaaatattatttagcatatgggaatttgaaagcgataatttaaaagacattccagaaatagaaaaaatctttataaattcatgcttaccaagttatttaagagaagaatatacactggaatgcttaataaaacaacctttagaaatatttgaattggacattataagaaatgaattaacaccaatgaacatgagtttgtgggaatacgaaacatttataaaagaaaatagcaaagctcctaaagccttaaaaatggcatttataaatcaatgtaaagatgaaagtactttttatatagcttgtgaatcttttgaccctgaaagtatggtaacaagtaaaaatatgaaaattgttaatgagtatgtttttcatcataagcaagaaattgaagaagtaataaataagtcatttactcatgttgaaagttactaataaaatcttaaaaaaggaagaaggaataaaaatgtatactttagaaaaattaagggagctaaataagtcatatgattatgaacatacattaaatgaatctgacgtggaaaaagctaacagttgggtaaagaagattgaaggaagtagaaataaaaattttccacaagttggtgatatagtggagtacacaacaaaaaatggagactactataaaaatgcacatattgaaaatatatatgtcaaagataaaaaaatatacatatgtgaagaaccatatgtaccatttctttgttctgcttttaatgagataaacacctcaacaagtggtggcgcttgggcttatatcccaacaaaattaaaattaataggtgaacgggaaaaatcttttcgtgattggggacattgtggcggctgcggaaatggtgccataacttttaaagcaatagtaaacgtatggaaatatgaagaaattccaaatttaaaatacacaacagaatattatgacaaaatttatataacaattaatccagaagatgattacaaatatactagtagatatggagcttggaagaatgatgaaatcttttcagcatggattcaagcatataaaggaaacatagaaaagagtaagtttaatgataaatgttttacagtgtggatttataaaagtgaaaaagtttattgtgaaactaaagaagagtacgaaaaaattgaaggtataaaagatacgttgtattgtaatgggaatttaaaatatggattaagagaatgtaaaagggtgtatgacgataaaaataaaaagatggttacgtatatacccttaagtatccaatagaaaaatacaatatatagaaaattctttagtaaaggagaatataaaaatgaaagatgatttaattatatgggtagtaatagattcggagtattgggaatttaaaagagaggaattcgagtatacttttaaacttgatgaagtgctcgattatgataaagtggaagaaatatatatacataatgctttaataagggtgaattataaaaacggcaaaataaaggaatacaaatatgagcatgatacaaaaacttattatttagtaaagaaaggtacttgtgaaaaactcataaaatggttaaaagatagaagaagaagctttttagtatacttatctacacattagaataaaagaacgattttataaattgttaaggcacataattaagtgtatgtgtcttatagagtttataagaaaggaagtattgttatgtataaattttatgtatttactgcaaacaaagtagtagaaaatttaaatattaaggaagctatagaagagtataaaaaaattaatggaagtgaatataaggctataggcgtaagaaaagattatagttgttgtgatttattaaataacctaggtaaaggatataaaaataagataagccaagactataagaaatccagttttaaacaagatagattaattactataaatgcgctaaatatattaagaagtagctttaatttggaagactaaagagataaataaaagataggagtaatgaaatgaataaatatataataaaaaatatagtgtataaaaatgttattgatatgatgatgaaaaatgatagtaatagttctttagatacgttgttatatgaacttgataataacatagatgaagctatagaagtcttaaaattaattatacatagaatatcacttgaagaagaactggataaacaagaaaaacaattttataaaactcaattaaaagcaatagaagaacttatatgaaaatataattgaagtttcaaagtaaacataatatatgcaaattagaggtgaatatattgctattagaaaatgaggttgaaaatgaaatacgttatggtttagatatgtattcttataattttaaaaaaagtgtatatgattttttaaaaggtcaagatattactatacttgatccaacacgattaattaaatttttcaagaggcattatataaactattcctataaagaaatattttgcgggttttcgtttaattttaaaggatttgatttagataggtataagaaagataaaataaatagcttataacaattagtataaagaaaagagggaataacaaaatggtactaaataaattgtatacagttatatataaatacaaagatagtgaaaataggaataaagatgttttaaatggactacaactttatgcatggaaacaaagaataaatagtcatttagtaaatgatgaaattataagtgttgttgaagcatggcttcctagaacacttaatgaaaaaatttcgaaatatataatagaatgtgttcaagaagaaagcgattccagtatgagtggttttcaatatacaattgaaaatcaacaattagaggaaaagtttaattgtaaattagataagaagagtatagaagaaattgaaaacatattatgctcaagagaagaggttgcagatgttcaagtatacgacaacctttttgatgtagttttatatactaattatgcaccaaattacatagaagacaatgaagaatattagatgtaacaacaatggagtttaataaacaatagaaaagaggagtaataatggattttttagagttaaacaatagtaacttagggtttactaaaagcttaaagccttttcaaaaatgtaaggttgaaagtgctttaaacacattatatcgtatgcacataaaagacaatagttatatcttgaagggcaaagattttatcatttatcgtatgtttcaatgtggttacgctacttatatcaacgaaaatgaacaacattataagagggatggaacacttacaaagcctaaaaatatttatggtattggaaataatgagggctatataaaaaccacaaagacgttatataaatttgccttatatcttaagaaaaactttaaaactatagaagatattaaaatttatttaaagcaggaacaggaagagaagataaaagaacagcaagaagaaaaggagaagaaactgaaagaacagcaagtattagaaaagaataaaaataaagaaaatcagtttaaaagttggttggataatcaaattttaaattttaaagataatgggaaattagaacttgcaaaggatatgtttttaaatgagtcgaacagctacaatgaaagctatcttaaaaagctaataatattaacgcttaatatagataacccaaaatgtaaagaagctttaaaacgtgttttatggaatggtaataaaacaagtaaaaaggttttttattgtcttactggcattaagttaccgctaacagataaaggcacgtatacgattttaaataacgtaagcagtaaagactacaaaggcatacaagaatataaaaagagacagcagcataacaaagatatgcgctcttattataagcttgtgagagataagcaagatattaataagacaagctttaagctttctaaaggtgaatatttaaaatggcaaggcttagatttatttatagaaaagtgtggaggtgtttattctattacggaaggtaaaacaggtgtgcttttaattggcagtgaaaaaacaagaaaaaagttaaaaggggaactaaaaaatttaaaaagtcatttagaagaaataaagaaacagataaataatagtattaattcttatggcttatcgcctttatataaagttgatgagttaaaagaacaggagggctaataatgttattcgtggcgcttatgggtttagggattatttatgatcatattctgtttaaagtgctgctagaagatagggaaaacaaaaataggagagtgttaaaaatgagtgaggttgaaaaagaacaattattacaggaatatattgataaacataacaacagaacttgtgattgtaatgagcaagacatggaattatgtttaggtggattgtatctaaatgggttattgagtaaagaagaaatttttgaggattgggattaaaacaattattataaaaaagcaaataaaagtaattttttataataaggagagaagataaaatgacaagagaagaaaattataaaattaggtttaacacaactcagacggatttaatagaatataatgggcggggtgtaaaatattaaatgaacttaataaaagtttatatgataaaaaagaggtaggaaaaatgtataatgttaggttatcaaatggtgttgagattcaagcatttgcagatgagcttaaggaggaagaataattatgttacaggatattaaaaaggaaaaattagaggtagaaggatatataaataaaaattttatagtcgttaatgccgcatttaagcagggtaaaatatcaaaagataaaaaagatagtttattaaagaaactcagggagtcattaagtaggttatcacaacttgaagataccatggagataagaaaggggttattataaatggaaaagtattcacaagatataatggaagattgcaggcaaagattaggtttagaaaagaatgatacctcaaaagacaatatcattatggaatggagtaagtcaagagtcctaaatgaagttactgcgtggaatggtcttatcggctttggtgataccattgttaagtgggtagaaagtatatgtgaaattaatttagaagattagaagtctactattaacagttagtatttaaatagaaagaaggataaaattatggataaaaagcttttaaaagtagaaggaaaagaaatagttttgttgttagagaatagttgtagtcataatagaaaagactattctttatttggttttattatcaaatctcagccaaataaaatttatatggattatgtaagttcgtgtaaatcagatgattatagagaaagggacttagtagatatatcaaaaattatagctactaagctagaagaaaaaaagaaacaagtattaaaagtttttcttgacaataatataaacaaaattaatttttatgatgagtatttttttcgaaatttttatagattcacatataactttgaagaggaaaaacattgtgtaaacaattgggattttggtaatataattgatggtattattaaatttcaatttaataataagactatagaatttaatgttttaacaaaagaattatctacagaagatgattggaagtatgttttttatagtaagatagaattattgattttattagctttagaacaagtaaagcatggaaaaggtaataaaacatttgtagaattattagaattaggcaaatggttgcgaggaaaaaaatcaataaagatatatttaaaagatataggtaaagttgagtataaatcaaattataatgtttcattgagaggaatattggatttttcaagtaagagatttactataaatgatttttatgattttaatcctagattaagacaagataaagaacttgaagatttagactatcttcaatatggtaagaaaaaatattttataaatatagaaaacttaattctttcaaaagcaagataaatatatttatatatgtttctaagtgtattataatgttattaaatagtattttgtatggggagtgtatactatgaaagatcatataaataaatttgatgaagaaatgaaaaaacatttaattcatgaacaaaagaaattattaagcgacttaggagaaacattgtatggtattgaacagcaaatgacttttagtaaagactttagagaccttattaaaaagttggattttttaaaaaaatcgccaatagaagttgcagcaaggttaagctgcttagaaggagtatgtgagattagggaagaagaggacaaagaaaaagaaaaaaatatgagttttgaagaaaagctgcataaggcaaaattggaattgatgcttgaaaattggaataaacgataagagattattatatagtctcttatttttttacaaaaaaattaagtaacgtataatacgttaaacataaagaaagaggtaatgtaaagtgataactgtagttgatttaggaaactttaatatcaaatataaatcaggaagcaatcagggtaattttagtagtaaaattaccgattatcaaccatacccagaagggtttgaaagaatacaaatgcaaggagaaagtaagattacatatctaggtgttggcgaattaaataaagaatttaacaaggtggcaagaaattatttgccacaattgctttatgcgatttgtagggcaaataattatgacaatatagaaactaatttagtaactcttttaccaatagttcaaatgaaaaataaggaaaagatgattgaaaatttaaaagaaaaagagttcaattttcagttcaacggagaaaagagaaaagttcttattaatgatacaatagttctcccagagggttatgctacttattttagcttatcagaagaggataaagaaagtagtctttgcataatagacttaggcagcagaacaataaacatatgtgtattacaagatggggctattcaactattgcatacaattaaattgggtagctttgatttttatacaaaggttaagactagagaaaattcaaaaggtgaagactacacagaagaggacattccaaggctggttgagaatgggacaatagaaataagtgatattgaatacgaggattttttaacagaagtgcttaatgaagtaaaggcttatgttaacttaaaaacatataaagtgatttggacaggaggaactgctttaatgttaaaagaacaaatagaaaagttaccattaaataattcaaaattacacaatgatccattaaatagtaatacgaatggtgcagcaggagcagcagaaataatatggcagagtgaagaagaatgagtaagagaatatatattacattaaatgaagataaggaaaaagataaaaaaattttagattatctttctcaatcttatagagcgcaagataccattaaagaaatattatatcgtttagctataaatggttgcctttcggtgcagaacgataatataagtcaaattaaaagcagtaccgttgaggtgcaacaagatgataataggtgtgatatggatacgaaaaagaaaaaaataattgaaccagttaatactaataaggtgcataaagatgataaaagacgtaaaaatgaattaaatcaacttaaagggtttatatagtacagaaaggaggttatttgatgattgaagaaatagaagatgctagaaaagaatggatacaaactgatgattttcagtttgtgaaggaagtgtctaaaggtatttttaaaataataaatatagctgaaataaatgaaatatatgctattagctatcattcaatagacttaaataattatacgaaagaggaacttgaaaacgctgtaaatacttattacaaaagtttagaggacttgtatgcagaatataaagaaagtagcaatcaaattatagcagaaattctttcagaacaagaaactttttctaaaagaaaacttttaggttctttagatgaagttaaaaaatggatattggaaaattataaaatcacccttttataggtattttaggaggtagaaaatgaaattaacaagtgaagataaaaaaacaataacaggatggggtataaagaagaagacttgatacaaattgaagaagcaacatcaaagacagtatataaaatggatgataaaaaatctcacaaagaaagctttagaagtattaggaagaaaaacatatttaagcggaatttgtagaagtgctttttattggtcagcagtaagaaataataatagcgaagaagtatattttgactcatcaaagttatttaaataaaaaataagattatgaaagagagttgttaaggatgaatgaattgaaaatattactagatactgtatgtataatgaattatgataaaaattgtggtgattgcccattgagaaacggtagatttaaagcgataacaaaggataataaatataatgtaaaacttaaaaaaatagcaaaagaatttttgaaagataaaatttattttttatatcaagataagcaagatgaaaaagcaatatacttaactaacaaaaaagtaatagaaatggacactatagactaattagattatgtcataatgattcatgtaatatattaattgatgaattatcattagttaataactttaatgaaattactttatagtctattgaatggagatgttgaaaggttgagaaaaatagagaataaattatataggatacaatattatacaagggtggaaattgtagaagcagaaatcaaaaaagagctatttgaatatttagcgaaacaagaaagtaaaggctatttaataagtagtgtagtggaaatagattattatacggggaaaactccacgtatagctttcaaaacaaacaatgaatataagaaaattaaaagaacattacaaattaaatgagattgttaaagaaaaaattgaaaaataaattatagggagttgtgtgaaaatgaataaattagaaagattatatgaaataagaaaagaacttgataaaacattaagaaaaatagaattagagcaagtacaattaaaaaatgagattacagaaaaaagaaatataggttggaataagatgtttgatgatttatattccttgaaaaaatattcatgttttattgatacaggaatttcattgtataaatgtggagatgaaacgctaggttttgaaattagagatgaatatatttgtgtgatttcttggaagcatattaattgtgatggtaaacgtattgaaccaagaacagaaacatatttttttactattaagaaacaagaaccatttaagacagatcttctttataggaattatatgaaatatgtaatttatgctatagaaaattggaacgaagtgaaggttgaaatagaaagaagattatcaaagagaatagaatcagaaatgaaaaagaaaatttctaatttagaaaaaagacaaaatgaattagaaaaagaactctcattaataaatcattaaaagtacatggttcatcaatgagagttttaagtggataatttaaggtaaaaatgaaagtgaatgataaagagtgtgaataccttgaaaggacaattttatcaatccaaccagtagagaacaaattggaaatagctataaagccattagattactaaatagaaggtttactttaaattgaagtaaaaagtatagaaaaattttatctttaagcaagagttagtggaatcaattactagctttttcatatacaaaaatataataaaagaaatggggttctaataatgttaaaaaaatcaaatatacaatggactgctaaacagattgcaaaaatgatggacaagggtactcttggatttgacaattcagtacaacgtggtttatgttggaaaactgataaaaagatattgcttatagattcaatgtttcagaattatcctattccagctttttatgcagcaagaaatgaagataaaacatatgatatgttggatggaaaacagcgttgtcatgcaattaaggaatttatagaaggaaagtttaaacttgatggaatagaagaagttgagttagaagatggagaatcaattgatgtaaatggaatgagttttgaggaattaccagaggaattacaagatagagtaaaagattactctttaacagtatatttctttttggatttatcagatgatcaagtaagtgaaatgttttatagattaaacaatggaaaagctttatcagcaatagaattaacaagagttaaagccaaaagttttgatgcaataagggaattaggtaatcatgaaatatttaaaaatgctctaacattaaagcaggtaaataaatatacaaatgaagatattgtaataaagacgtatgcaatgttatatacagaaaaccctagttttgaaactaaaaaaataagaccgcttatgcaagatgtagaatttacagaacaacaaaaagaagagataaaaaaagcatatagtaaaatattagatatatggaaagcaataaatacagaagataaagaacataaaaagatagctaaaagaattcttacaagaacgcatttacttacaataatacctatagtaattaaatcagataaaactatagaagaactagcaagttggttattaaaattttacagtggaaaaagaagagcttctataagtgaaaaatataattctgctgctggttcaggttcggcaagatcagaatctatcaagattagattagaggaacttaaaaaagactataacgagtatttttctaatcaagatgaagaaatcaacaaaaaaatagaagagatttttaaagaaggtgacagtattgaataataaagaaaaggaaatagaaaatttatgtagaatatataattttaaatatgattttatagggaattttattaggataaaaagtaaattagatacgtggtatattaaaagaaatcaggtgatgaaggaaggaattgtattatatcatgaaaatacacgccaaggggtgggtatgcatcaccatggtaaacataaaaatttgaagttcttatttaaagaaatcgaatcgcatgataacagattctttcttccactgaaagtaaggtgtgcttaaatgggagtatttttgtttttcggaataataaaaatactactagagattgtaatagaggtaataagatttttaagagacgttttttcttctatagtatggattaaagaaaagaataatttaaataaagagttggaggtgcgaaaaagaaaatgaaggtagaagaaagacttgaaatgtatgaaaaaaatcttttagttaagtctgaaggaactagaaaacaatatttaaatgatttaaaagtatggtttagatatatgaaaaacaaaaaaaggcagataacaaaagatgaggattttgttaatatagattatagggagataaaaaaattcattaactacttaataaaaaatgggagagcagcaacaacaattagaagaaaaattattagtttaaagttattctttcaatatttagatcaagaaaaaattgtattagataacccttttgataagatagacaaaagagatttacctaagattcctaaaagattgccaaaatcattaagtatagaagaatgcaaaaggttgataaatagtgttaatagcagaaatactattcgagataagtgtattataataatatttttatcaacaggtatgagattatcagaactcatatccctaaatgtagataatatattagaagaagaaataagaattataggtaaagaaaataaagaaagagtagtttatttaacagatcaggcaaaaaagattgttaaattatatattaaacaaagaccaaaaaatttaaagacaaaagctctatttttatcagaaagaaatggtagaatagcacgaggaactgttcaaaatgctatcagaaatgccatgtacaatgcaggaattaaaggtgacaatgatgttttagtacatatattaagacatacgtttgcaactctattatatcaaagtggagaagtagatttatttcagttacaagaattattaggacacgaagatgtttctacaaccagaatatacacagatgtttctaaagagcaattaaaaaatgcagtagaagccaatcctcttaataagatattttgaatttttaatttatagcaattagtatattgacttttttcatacgaattgctataattgattttgtgaggtgaaaaaaatgaatttaaatatagataatcaaattttgaaaggtaaagaactagaaatttccgcatttctaaagaagagatttttattatctcccatatctatttcaaaagagatagaaaaaatgctagagggagactatagtattcttgaaacagaaaaggatcaagaagaatttaagaatattttatttaaagaggatttaaaaaataaaaataaggttgataacgatacaaatgcggatgttttaaagatagaattaagtaaacttaaaagatcaaatcaaaaaaaggatgaagatatacaaagcttaaagaatgcattacaaaaggctgctgaagataacaatagattaaaagggcttctttctattacagttaataaagagttagtggtagttgaagatgaggaaattgatgaactttttgtgcgctatatgacatcatcaggagctgttaaaaagtacaaaaaggctattgttatagaggaattgggtattattcctaagtccttttacatcattaagaaaggagtaagtaaagatgaagaacacgagtaaatactattataatttatttacgcaattttacccaaaagcttccaaaagaattctaaagactattatagaagtagaagaaaaaacgggaaaaggtttgatggagtgggaacaaaagaatggaaaagaagtaggaatgttaatggatattgtaagaccatcaacacctagaggagttaattcagttttattagttctcagacagtttgctgcttatgttgcatacgaagaaaatataactataggaaattttcctgttacagatttatcaagatatgtaaaaaaggatgaagttaaggaaactttaatttcatataaacaatataaagatatgtgtggtgttgtgcaatgtataagggatagattagttattgaattatcttgggagggattgaaacctgatgaaatacaaaatttaaaaatgcaagatatttcttttttgaataaaaaagctttattaaaaacaaaaaataaagaatatattatagaagataaagatattataaaagatcttcataatatagagaatgaaaagggaaaggagaagatggggaaggatgggagagtatatacaatagattataaagaatgtccttatgttataaaggcactattaataggatgtcgtactgatggtaaagtgaaaggaataagaaatattttttctaaaactaagcaggaatataaagacgaatttaggaaaataaacataaacttagagaaagtagatttaagaattgttagaatgtcaaagatgttatttctactaaaaaagggagtatctattgaagttgttgctgctgcttatggctatgcaacagcagactctattaaatggttaacaaaattaaagtagttatagagggggataataaaatgaaaaatgaaactaaagcaaaggcaaaattagacttatttaaaaaggttaaagagtatatcttatctaaaggagagaatatagatggagataggttttatatgatacctatctcttatgggtatgttgttctttatataaacgaatgggattggcaagtaggaatatatcagtatggggaaaagcagaatgaaaagataagcaatcccataaatgttaatttacaagattcaaaagacattgaattttgtaaaagtgcaatagaagaaattttggaattagcaaaaatggctgtttttacagaagatgaaaaaaagagatatgattattatgaaagaaaaatagaaatgggtattatccctaataaagagataataaataagtgttatttatatacatttacaacgaatagagaggtatccgctttattttaatcacttatggcgattagtattttacaattttataaaaataaaatttatgttaaatgaattttatttttataaaatgcattaaaaaagcaaggacaaggagtaaaaaatgaggttaagaaaagttcataaagaaatttgtcaaatgaaactatggaaatacgaatatcaaaacgaagaagaaaaggaaacacacaaaaagcaaatgagaaaagctttatttaacatagaaagtgaaagcaaattggaagtagaatatagccaaactataagaataaacaatagctgttagaaggttataaattaagatataagagtgtaaaaaggttatataaacaattacaattatatcttattaaatataaataatatttaggaggagttagaaatgataaaaaaaataacaaacagggaaatgataaatgggataagtggaatgcaacagctaatgaaaaaagagctaccaataagggcttcgtatgcactaatgaaaaacaaaaataaagttaatagtgtattaaagaattttgatgaaatatcaaaaaaattaacagataaatatgtgaaaagagatgaaaatggaaatccattaaaagataaaaaagggttacctaaaagtgacaaccaagagcagtggaacaaagattttgaggagttgttagatattgaaaatgaaatagatgttcatcaaatttcaattagtgatttacaaggggtaaacttatctgtagggcaattagaagcaattaattttatgatcaaggaggagtaaaggcgatataggaagagatatagataagaattaaaaataaaattatatgggtgtgatgttatcaaatatacttttgatttaccaaaatcgctatatgcaacaaaaaaatggattaaaggaaagagtgggagaagtatcttggtgcgaatgaaaaagtacctttgctgtatatgtgtaaaaaacgttcaaatcaagatttatttaattgtgtgaggaatggaaacagggtggaagtgattggcaacatctacgaaaatcctgagttattagaggtaattgtatgaatagaagacaagttaaaaagataagtaagaatatcaataagcgtattcgtttttttaacgcacatttaactatgtgtagtaaaagaaacgataagacaatattgtataggaatattaataaagcctgttatagcaaaaagtataagccatttaagttactgaaaaaggtttatgaaaaaatatttctagcaatagacttatggagtggtaaagattatagtgtggagactatatatgaaatcaaagatggtagtgcaactcttataaaaactagcttttataagaagagagaggagatataagtgaaagaaatatatgtgaatattctactaagggatggaacactcattcataaagctagaatagcaaagaataaagtatgtaataaaggcgatattgcatttttttgttctacaaaggaagaaattaaaggaattttagaaagcaataatcacttaatttggatttgtacaaaatattttcaagggaatatatcttgtacaagtatgattgaatcatattctatattagaagaataaagaggtgttatgttttgaaaattgatacattagaaacgaatcaaacggcagagaacaaagaagtttacgttgttgatgtggtgtttatatctggaaaaggtactgcttgtgattgtgctgtatatgcagataatagtggactaaatccaccattaaaaaagaaaaaagatattgttgcagcattacaaggaaagaatatggggttggtagtcctagaaaataggtatattcgcttaaaaaccaaagcagattatatagagtcttacaatataaaaaaaataaaggagaatgagttttaatatgaaaatttgtgtagcagaatttttaaaaaagtacgagaagtaccatccattaataaatagattagaagataagtggcattgcaatttagctgataggataatgaacatagaacctgtcagtgatccgttaaataataaacatttttgtcatggatatggcaacacactagaagaagcaatatctagtagtctgaaaatttttaatctaagaaataacaaataaaataaggtggtgtgtttatatgaagaaatcaggatgcttagggtgttttgttccgatttttttagtaattcttaatataagtataggagcttggtcggtacaagagatcctttcatggtttcatattgctatacctacgataggtaatttaataataggattatttacaggagaaataactatacctattgcagtatgtggttgggtgctgaaattttttggagctattagtttcacttgacttataacacttagtattgtattataaatataatgataaattttaggaggaatgtttcaatggcaaaacaagagtataaaggaattttacaagaacagaaaggatcatttagattaagaggaagaattcaaggacttacagaacctagaaaatcattgggatttgaagatgttccagaaaaagcagacaagagagcttacagaaaaatacgatttatcttacaaacatcagatagtaatagtccagttgttgaggtttttggatgcacgcaagataatgcatatgcttataacaaagaaaaggaaaaggcgttggctgttgattggaataagagaaataatccattacctaaaggatatgagattattgaaacggattatgatttagcaaaaaggattaatgatgattttaaagatggtatggatgtggtaattataggaaaaccatcatatagtacttatcaaaacaaagatggtgtaactaaagaacaatatacattaaatatttcgaaagtacaacaatgtactaatcctataaactttagtgatgaaaaatttaaggaagaaaataattttactcaggaaattacaataagagaagtaagagaagataaaaaagagcaaagattatatatatatgcatatataattggatatgcaggacgttttgagccagctacgtttagagttaatatagaaacaaatcctatgtttgcaaaagttgtaaaaggatttaaatttggagatgtagttaaggttaatggaattatagaaaatagggttgtggttcaaaatacagattggggaacacaagttggaagtaattttgataaatgcttactggtaacaggtgctgatcctaaaagctatataaagaaaaaatataaaaatacagattttgtgaaaacacaaaaacaacaagcagaagatatttttaatggaaacgcatctcaagataatttaagtcaagaagatgataatggatggggaacatctgaagaaaatatggaaaatagtaataataatgaagttttcccattccaattatagattagttacaaagaggagaattttatttctcccacttataacaattagcacgaaaaggagaaatgattatgagttttgatttaagtgaattaggagtagaaaaaaatataccaaaggttaattttacagagtattcaggtttgatagttgctgaaccaaaatgggggaaaacaactttatcaagtctgtaccctaatgcaattatattacctttcgaaaaaggctataaaggaaatgtagcaaatatctttaagagattgttttcatgggatgattttatagaatttatagataagttagaagaaaaaagagaagaaattggagatacaattaaggtacttgtttttgatacagtaaatgaagcgtatagtatggtagacagatatacgttacaaagattaagtattttagatggtaaaaactatatggcagcaagagaagttccacatggacaattttattcagaaaaagataaagattttatggagcaaattagaagaattgaaaatctaggatttatgcctttattcataagtcatttagagaaaaaaacagtaacacctaagaaaggagagccttatgatatatacactagtactatgccagaaaggttacaaaaaattataaaccctttggtttcatatattatttatggtgaaaggacattagcagatgatggaaatggaaataagattccaaaacgtgtattactgactaagagtgacgaaatggttactgctggatcaagagttagacttgatcacaatattgtttttgatacagaagaagaagcaatggaaaagtttcaaaatgcttttaaagattcgataagaaaaacacttataaatgcagggatagaaaaggatttagatgttttatcaaaagaacagcaagaagaaaagaataaagagataacaaagagtctatcagggaaaaaaaatgagattgagttatcacaagtaataaaacaaattctttcagaaataggaactctaactaaggaaggcaaagcgccatctgtaataatgcctattttaactgataatggtataacagatccacatcttatctcggaagtagatcttgctaagaaaatattaaaagaattacaagatttaaattaaacaattgtatataaaagatgcttaaataggatgtgatgtaattgacaaaaagagctagagtaggcttatttggattgtgtgtaataagtacattatgtttaaacaataacactacaataaaaataaataagcctataacggcttgtttgccaccaaaatcagaaatggtagataagtttgaatttgatggggataaagagtttcaaaaagttcaatataaattgtgtttagaagaaaaagagaagcaaagaatattacagcaaaaaacatgtgagcagcaagttgaattaaaaaggcaaaaagaattaaaaactataaaaattgaattgagcttttatacaaataattgcattgattgtggaaaaaatgatgcaatttctaaaagtggaaagaaacttgatgaatcttatgtgtattgtgcagcacctccagatattccatttgggacaattatatcaattaaaggatttggtgatttaattgttgttgataggggtagagcaatacattataaatatgatcaagatggaaataaaattatgaaattggatgtttttgttttaggagcctcagaggaatttcttaacagtaagggtatagtgaaaacaacaggggtaattaagtaaaataattttatccctgtttgtacatataagagaggcttaaataaaaaatacgagagaaaaggaaggtattaattataaatttcaattatcagatagttcaagaaataagtatcaagatatttatagaatatcttataatcatgagaatgtattaatacttaagaaaacaataatttttgaagattcaattataaaacctatcaaaaataaaaaatctttttattatgaattaaaaactatagagaattgttttagtggtaactatattgattttaaggggttattaaataaagttaacaatactatagaggaaaactattaaaaaaatttttatatgcaaaataaaaaatcagtgtattgtgtagacgaggtggaattttgttatgtatgtaaatacgtggtataggcaatgtagaatattgaaatttaatagagacttaagaatggtaaatttctaaaggtactattgattactattgtatgtcatttttaaaaagtttataattttatcataattaattatttacttgttaggggagaggatttatcttggaatataaatcattaatcaatttgtcaagcataaaagatgataaacatacagataaaacaataaaaagtattttgatgaattttgcaaaaaatattgataatcaagaagttgctgaaaatttaatagaggagttttatgtagaaaattataattttgtaaaaaatgaggatattagtgagcaggcttgtaaatttattaataattttattagattagtagctgatgcctttagggatttaaaatcaattgataaaaatatcgaaagaagcataaatgctatgaaaaataaggataaagataattatgaatcaaaaaaacatagttattttatagaaataaacaaaaaagctaaattaagcaaagaaaattatattttaaataaattattgtcagagctaaaaaaaagaatgaaacttcaacagaatgggttagaaaaagttggtatgtttgaaaaggatgataattatagctggtataaagaatattatgatccagaatatgattttagcgtttcagtgaaattttttgacgcttttcatttccacaaggataaggtagcagaacttattaaattaaagaaaactaatgaggataagtactacgaatatgttaaagattttatttcgcataaaaaggttagtaactatattttatctaatgtaaaaaataattatattttaaaaattaaaaaagaagtatttgtaatattattagcattatttcagaaatcggcataccaaacatttgtaagtttaggagccatacaagttgaagggcttttttatgatttttgttctgcaattaaagggggggaaaggaacgttgaggaaggtactattatcaacaaacttgataaagtttttgaagataatgaaattcaaaagcttatgtattatccatattttgcgtttgaagttccaatatatcgaaatgaggtagcacataatggaatcatgaatgataaacaaatagagcatagggcttatgatatactgcttgatatgtattcaattattaaacttatgcaaagggattcgttgccttttaataatgtatattttttaatattccaaataaaggaatactcaaaggcaaaagactattcagaagaaaattactactatattttagattctttaattgattgtcaacattctaatgttattgggaaaggaaaatttagtatatattcaattataaaaaatatagaaaaatacgaaccaatccttagaacatatgaaatttattatgaagataaaagaagaaatttaaacatatatgaagaaggattaaaattaagaaagacgttttatgatgataatttctgggagtatcttttaaaaacgttatctgagcatgataatgaaaatcttaataaattactaaggcaaatgtgtaatgagtttataagtgtcctcccaggttctaatcaagcaaaaaaaagttgtattgaaattaagaaattattagataaacgagagcaatttagctagagttttatttttattgatgctatttaatatatatgtagttagaataattgttgtttagcaaagttgaaggcttatgcagatatatgtatatctgcataaatacttaaagagaggaaggaatgagtttttgtgtgtgattgcatagagcaaatacaaaataaaattaaaaataatttttcaaaaaggcatccagagtcaaatactaaagaagctaaattgcaaaatttatattttgatacagaagatcattgggttgtaaaaccatacatgcccttgaaggttgagtatgaaagtaaaacaaaaaaagggacaattcaaaataaacacgaaatcgtcaatatgcaagttagatattgcccattttgtggaaaatcttataaagaaaaaggagaatgtaaatagtgttaaaattgaaaaaaggtattagtgtagatcagttaagaagatatggatttaaaacaggaaaagaatgggctgataaaggtgagaggtgtttagaagggagtggatatgaataccaacataattggtatcacaagtttcttatggatgaagaaaatcctgataaaattttatatgctaatgaagaatatgatcaacctgtagtgcagatatcaataagaataggagatagttttcctaatgatatgtatatagagtgcacaccttcaggaacttatcatataggaggtcgggatttagatatcatagaggaaacagtatttgatttaactaatgatggatttttagaaaaatagtttgatataaataggaggattatattgataggttttctgtcaaagataatattccaacttttaagtatgaaaacttacagaacaaaacattattgatggaaataatagaaaatgaagaaggacttataattggtggagtcgatatcaatacaggtataacatatatattattttctaaattaaataagttacaattttaaatagttaaataaaaaaagtaaaatataatcaaaaggaaataaggaaaatatgaatattaaaaagcagcaacagttatataaattaaaaaagaaattattagattactggtgcaaaattatatatcctttagcttggttaattaataaaatatgttatattaaaaagaaatctgaatataaaaaaatatttaagtggtcagatgaatatgtaataaagagatttactgaattgtggattaaaagaaatattgtttacaatcatattaaaggagaaagagaatttgtcatatgtagttggtgtaatgaggattttggatggcatacgatttttgatgagatgagattttgtacagataaaaaaattaaaatttggtattatcataacatagatataaattctaacaataatataactaaactaacacattttacagaaatgtttaaaaataaacttgaaaagtatcctaaaaatattgagtgtaaatggattaataattccaagagaaagggtgaatatggagaaatagtgggatataaaaagagtttggtcattaaatttttaatgtaaggagatagatgctttgataaaggaacataagtgtaagtattgtggactaaaaggaattctgccttcatatcaaaaacatgatagaaaaggtaacttaaaatggaaagaaaaaatagtattaaaagatgaagaaaaaacgagggaatttagagtagataaagaaggaaataagattccagatgtatattatgctcataaagaatgtgaagatagagcaaaatatgagcgtgagagttggtgtgagctatatgaatggataaaagaaaaatggtttgatgtaaacttaccatcaaatatggttgtaagattacaggatcttagaaatggcacttcaagattaggaaaaattatagattcaaaagctggatatgaatataatttaattttggaatgtttcagaaattatgaagaagaagttgaacaggctatcggaggaaaagaatttaactctaaaaaccaaaaagccaattatataatgactattattgaaaataaaatagatagctttcaaggaaaagagaatcagcaaaaaatatcagaaattaatacaaatagttttgaatttataaaggcagaaaatatagagaagcaagaagataataaaggtgattttgatttcttaaaatagacaacttatagcggttagtatacaaaaaggagattttaaaaatgataaaagaaagtataatcttgaaaaatttagaagttccaacaggaaatatatgtgttataaaaggagataaaggtaagttagaatttctatcattaggtgactatggcaaagaagtaaacgttaaagctgattttttaggaattactagagatttagaaggagttccaaatggcaaagtacaacctttaactaaaaaatgggttgtaaccatgagtacacaatatggctgtgattcagggtgtaaattttgtgatgtgcctaaagttgggaaaggcgttaatgtaacttacaatgatttaaaaacacagttagaacaggctttaaatcttcatccagaaatagatcgtacagaaagattgaatatacactatgcaagaatgggagaaccatcatggaataatgatgttttggattttacaagaaatttaaaaaatatagtaaagccttatattggagaaagtttgatacatccagtatttacaaccatgtgtcctaataaaaataaatttttggctcatagaataaatgaatgggtagatataaaaaataatctttttcaaggtgatgcaggactccaattaagtataaattcgacaaatgaaaatcaaagaagagatatgtttagaggaaatgctctaactttaaatgagatatcttcaataggaaatgatttacctatgccaaagggaaggaaatactgcttgaattttgcattagcagatgagtatgaagtagatgcaaaagtgctgaagaaattgtttgatccaagtaaatttatggttaagataacaccattgcataagacagtatcttctattgaaaatgatataaaaacaacaaaaggttatgtgtcgtatactccatataaagatatagagaatgatttgaagaaaatgggatttgatgttttagtgtttgtaccaagttatgatgaggacttaggaagaataacttgtggaaatgtaatattaagtggaagtttgccaaaatgtaaatataaaattaattaatatcaagggaggaaatcaaaatgattaaaaaaagagaatgtctagaatttatagataaggttgaaaaaaaagcaataaatagtgttgaggaaagatatttaaaaaaaataaaaaacgaaaagataaagatacttaaggaaacaggatatatgaaaaggcttaaaaaaattcagaagaactttaatttgatatttgacgagttcaacaatctagctttggaaatgaatgaaaataaagcagttgattatggcactggacgatactataacttcgagtatgaaggaagtcattttacatcagaaggaatagttagaagaactatagagaattgctcttttcatggaggatctgttgaattaatcgagaatgaggaaaagaaggaaattgaagcggtaaaagataattacgacaaagtaaggattgtagtaaaaagaaaccccaatggagtaaaagcagctgagtatctaaaaggattagggtttgatataacatctttagaaaaagacgaatcaagggctttgacaataaagatagataaaacgaagttgtttgtatgtggagagaacaaataagaattaaaaatgaatgggtttagaaaattaacattaaaggcaggcgataaaatggaagttttacaagatataacaacagaatctttagcaataggatatttatatagagtacctgatactcttgtagaatatgaggaattaatttcagctaaatatgactttatagatgataatttaagattgttgtatttagtacttactctaacatataaacaggttcaaaaaataaatgagacaactgttagtatacaagtatctaaaatggatgaagaaacacaaaaaacatttaaaaattttggtggtaataatgcaataaatagattagttaaagttgctgcaaactatgaaaattttgatacaatttatcagcaattaaaaacgtggaatttaattagggagttagatagacgaggttttccagtaagaaataatttagatcagttaaaaaaaaggaaaactgatgaaatactaaaagcttatgacttgcaattagcaaaagtaggttcatatataaaaaatttaaatgattcagtagatttaggaaaaggaatgaaagaattctatactaatttaaagaagaagccagatataggggttgcattaccatttcctattctaaacacatttacaagaggatggagaacgagatgtgtatatggtagtggaatgggttcaggattaggaaagagtagagaagtatgttttatagcaatgtatttagcatattttaagaatacacctttagcgatttttgtaaacgagcaggatgaaaaagagtggaaagaaatgttacttactacagttactaataatataattgcacccaaaacaggtgtttatgtagatcaagaaaaaattgttactggtacttgcaatgaagaagaagacgaagctgtgcagatggcagcggaatttatagaaaagaatcacaatattaattttctggaacttgaagattattcttatgataatctcaaaataaacctaaaaaaagttaagctaaaaggaataagtcatgtcttttatgacacatataaggtttttagattttccaaaagtaatatggcgagttgggagcaatttgttgcaacaagtgaattgtttaaaaagatagttggatcacctaagaaacgtggactagacatggctttatggctaacgtttcaattattagatgaagcagtagtaaataaagttttagataacacagccacagcttcaggaaaacagatgaagcataatttagatatgatgaaaatgtcaagaatattagattataaagataaagaaaacataggtgtgaaaattcaacaacctaataacccagataatggacaagttgaaatattaagtgtagataaaacttattatatgacaaaagttgaaaaaaacagaggaggaaaagataaagattttatcatttatgaagttgataaagggaagataatgtttaaagaattagggtttgcctattttggtttaaaaaagattatgggaaaagataaaaagagcaagaattaatagcattaatatattggcgagaggaggtttacgatattgataaaagagtgctccccgaatgagtatgaggagataaaaagggttttgttagatgggttcataaatggattgagaaacaaagaagaattttatcagggatggctttcacaaaatattgcaagcatattcagtgtttataacacaattgagtgttatcataagaaatatcttagtagaaataaacaattattaacttttaataaagaatattttacactaaagtttagttgttatctatgtccatattacttgaataaagagtgtagaagaagggtgtttagggatgataaaagaaaagatagaaaaagatgaaggattaagaaaattaataaatgaattaaacagtaaaaaacaaatactaagagttggtatagtgttttttaatgatgatataaatatgaaaaaacagtatgattttgttaaaaatgaaattgatgaattgataattagtactaggttatataaagaatgtggtgaaatttgtactaaaacaacaagctataaattattaaaatttaattctaatgtagtaagagggcaaaaattccataaaatatattatgagaaatgtagtaaggatatattaacaattctgtatacaatgatctgttctaatagtgaaaatagagttagaaatccaattgaagagttttacattgaagataacttagatgaaaaaataggaagtgatacattataaaagctgactttataagaaatcaaaaactatatattgtgtgaaaaatttataatataatactatatatagtgctgtattataataaaagaggagctgattttaataaataagttagataaaatgaaactaattgaagatttaattgaaaagttaaataaatattcctacagctattatgtgcttgataatccaattgtagctgataaggaatatgatataatgtatgatgagcttaaaagattagaagaagaaacagagtatattaatcctaatagtccaactcaaagggttggtgatattatccttgataaatttgagaaaacacatcataaaaataaactttggagtcttgataaggctcaaaagaaggatgaagttaaagcttttgtaaataagtgtgttaaatttgtagagcaatataatttaacacatagtgaaaaattgccttcaccacaattcgttgtaacacaaaagcttgatggacttactataaattgttcatacaatgaaagtagattaattaaatctgcaactagggggacaggggaaataggagaagatattacagaacaaagtaaaaccattctcaatcttcctaatgctataaattatagtggagaaattgatgttcatggagaagcattaatgacaaaaaatgctttagaacaatataatagtaatttaaaagtaaatgaaacaccacttaaaaacttaaggaatggtgcagcaggagcattgagaaatttaaacataaaagaaactgcaagaagaaagctagtagctcaattttatgatcttagctatacagataagaagttaaaaaaatatagtgaaattttattatttttaaaatctcaaggatttaacataactgagtacaatatttgtaataattttgatgaaattaaccaagctattgataatataggagaggtaagaagtagcttacaatacgatatagatggagttgtaattcgattaaatgatatagaaacgagtagattaatgggctatacaataaagtgtcctaaatatgcaatagcttataaatttaaagcaaaagaaacaactacaaagctaatagatgtagaatggaacgtgggcagaagtggaagaatcaatccaacagctattttagaacctgtagaattagctggagtaatagttaaaagagctacattaaataatatggatgatataaagaggaaaaagattaaaaaaggtgctagagtatttctaagaagatctaatgatgtaataccagagattatgggagttacagaagagacagagggagaaacgaaggaaatagaagcaccaacaatatgcccatattgcggcagtgaaatagtaaaagaaggtgtacatttattttgtgaaaatactttgtcctgtaaaccccaaatggtaaaaagtatagtccattttgctagcagaaaagctatgaatatagaaggctttagtgagaaaacagcagaacaattatttgagaaattaaacataaaaagcatatctgacttatatagaataactaaagaagaattaatgtcattggataagtttaaagacaaaaaggctagtaatcttataaatgctatagagaaaagtaaggaatgtgatcttgattcatttgtatactcattgggtataccaaatgtaggaaaaaaaacagcaacagatttatgtaagcaatttaaaagctttgagaacataaaaaaagcttcttattttgagcttatcttggttcaagatataggatcaattgttgcaaaaagtattgttgatttttttaaacaagaaaaaatagaaaaaagtctaaatgaattatttaaacttggagtaaaaccatcttatgaagaaagtgaagtttcagaaagtgtatttaatgataaaactgtagttgcaacaggaagtcttcaaaattatagcagaacagaaataaaagaaaagttggagagccttggtgctaaggttgctggaagtgttagtaaaaaaactgattatgtaatagcaggtgaaaatgcaggatctaaatatgacaaagctgtagcacttggagttaaaatattaactgaagaaaagtttgaagaattaatagaaagtgtaaagtaggttttatttgacttacaacacttagtatggtacagtaattgtagaaggagggaatatatgaaaagtaaatcttttaatattttgatagaaattttaaacataataatttatattttaaacaaaaatgattttaagatttatgatgaagaaaatacggattattatatatctaaaataggatatagcggtttattagatgaaatattttttaaagtgaaagagagaaaaaagtaaaatctactttatatggagtgataaaatgacagcaaaggaattaaaagaattattaactcctgaaaagattattaaaattttagaagaagtgggttgccataatgtaagaaaagatggcaatacaattaaagcggcaaacccagatggtaataatccaactgctatttgctgctatattgataacgataatttgaattgcgaagattttactcgtgcaatttttcagcagagaagatgtagagatattatagctttagttgaattcttatgtaagttatctttttcaaaggctatgagaaagataactaatattcttggtttatcatacttctatgaacctaaacaacaaaaaccaagctttttgaagtttttagattttgttgaaacaggtaaaaaggaaacagaagaagatattcttaagtctttcccagaaaacattttaaatcaatttgtaaagatacccaatagaaaatggttagatgaagggatttcagaaaaaactcaaaaatattgggaatgttttttagatgtaataagtcaaagaataatatttcctatcagagaagagtcggcaggagaaatagtaggagtaaaaggaagattattagatgatgagttaattgataaaaataaatattttccaatatatgtttaccctaaaggaaaaatactttttggagcttggcagaatgaaaaatatataaaagaaaaaagtgaagttatagttgtagaaagcgaaaaatctgttataaagctctgggggataggaattaagaatgtagtagcaataggaggaaagtgcatttcagaagtacaggcagaaaagttgttgcgaatgaatgtgacaataactttagctttagataaagatgtaactgaggaagaagtttatgagaacattaagaaactaatgtatccagtaaagactgtaaatatctttataatcaaggatgaagcgaatttaatgaaaaaagaaaaagaatctccttgtgacaatgtagatacttggagaatcttatatagcgtttatagaaaggaagtgcctgttatcgagtggaaaaacaatgggtaaatttaaacaaaaaacctacagatttatcaatagaaaatattttgagaaatagagggataaaaaatttaaaacattttcttaatccattaccttctgatttcattccattaagtaaattaaaaagaatatttgaagcagcagaaataataataaaaggaataaaagaaaataagaaatttacaatcttctatgattgtgacttagatggtactgccgcaggaacaattatgagaaaatatttgttgaactttacacctaatgttgatattgcttatagtattggaaaagaacatggtttaagcagtattaatttagataatattatccaaaatacagatattttaattgctgtagactctagtacaggcaaccacaaggagcaagattatttaaaacaaaatggggttgaagttataatatatgatcatcatgatgagcctaacaatcagaatgtttgtattgttaatagtcagtttgaagattacccaaataaacaattaagtggagcaggagtagtatggaaaggctgtcttgctatagatagcctaatgaaaacaaaatatgctttgaattatgttgatttagcagcagcaggaatcttagcggatgtaatggatgttggtgaatcatatatggagaacaggttaattataactatggggtttaagcaccttgttaatgttggattaaagactgctataggaacgtatgattttaatagtacatccatattattttctgtggcaccgctggtaaatgcagctataaggatgagagaaaataaaatagcaattgattttttatttgaagaagaaaaaaaacagtcaaaaaaattacttaaaaaattaaaagaaataaaggaaaagcagaataagttggttgatatatctatgatcaatttggaatttcaaatgaagcaaaataactccgaaaacaaaaaagtatcttttggatttgttgagaataaaggcatagctggagttattgctacaaaagtttgtagtaaatttgataagccagcaatagttttaagttacccaaatccagcaaaagattttgataaatatataggaagtttaaggtctaatatagattttaaaactattgtaaataatacaaaattagcaaaatcacaagggcatgaaagagcagcaggaatagaaataaaaaaagaaaatttagaaaaattgcttgatacattagaacaaaaattaaaaaataaggagtttaaaaaggtagataagtttgacttgttaataaaagcagaatttttaacattaaatttgattaagcaaatagagaaaataaataggttaacaggtaaaaattttcaaccaataaatgtggttttggagaatgttgtgccagtagactttaccataatgataaagaagcatataaaatttaattttagagatatagagtttgtatattggaattctattgataaaatacaagactttaagactacttgtagcggtttgtatagaagtcttagtgttatgggaatacctcaagtctcatattttagaggaagagagaaaaagcaaattatgatacaagattataaagatgttaaagataacttcgaatttttaaaaggatatacaacaggagatatattataaatgaaaataatgagtaagaaactgttcgtagtcggaacaatgacgattatatcatttttttctgctttaattcatttgcagaacatgatatttataatatttatttttatatatttgcttatgttgcttttatttattaattaatgtggagggatagagaatgagttttactaatgatgctaagatcaactctattgtatacgcccattatgtgtggaagaagggagaaaaaaataaattcgcacaagtaaaagtcatatagcttatagcaattagtatgaaaggatctgtttttaagatgtctaatataaacgctatgttgaagcttatagatggtattacttttttaccagacaaagatgatttttcaaaagagaaaattcaaagtacttttaaaaagaaaatacaccctagacaagttataagttttcttgaagagattcctataagcatatataaggttaaattcagatatacaacttttcgaggaaacaggagagaaaaggagatgtattttttaataaaaacatattctccagaggaagatatgcaaaaatatttggataaatatataaatgatttcaataaaaaatttcctaatagacaattatcaaacgttcaaattcttgatagttgttgtaaaggattagtaactctttgagttacaattttggttttattctcaagttcctcacaaagaggttgtatagcaaaatagtaatttagtcacttattattttgcaaaaaaaacaggctaaaacgtaaaaaacacgcctaagaatattcattatttttactttaaggcggtaagagtgatgagcatagaaaatgcaaaagatcatgaaaccagattaaaggtaagtatgttttaatccttatttagttcagacaatttgaattaaataaggtggagaaaatgaaaccaatttttgaagaagaaaagttattctttgagaaaaaaacaggaataaagatacccaacaattgttggagaaatggaacaaaaatatatctaaattcaagcaacaaagaattactaataagatttaaaatagaagataatattataaaaattgttaaaaacaacatatacaaatttgaaaaaaatatagttgctgtaagagataaaaagcaagtaaaagtacttcacaattatacattagaagaagaaatatcacttaataaaaataggttgatttttttagagaataggtcagtaagtaaaagtttaaaatttataaagaaatataggtatcacgaaaaaaggttagctcattcaggtggaaaagatagtgatgtcttattctatatttttgtaaataaaattttaccattgcttaaaaacaaagattataaaattgattttaataatacgacaaatgatacagcacaaacttatttacacataaaagaactacccaatgataagttaaacattcacaatccccaaaaaggaattattgaatggataaccgaagataaaaattattttcttccatgcgttacaaatagaaattgttgcagtaattacaaagaaggtaggatgaaagactacttggataaggacaaaaagtatttgcttattttggggatgcgaagagatgagtctccagatagatcaaaatatgattatgatttaaataaatcaatgggagagaaaaataatgttcctgagaattggaaaaggtttttacctattcttgaatggacagatatagatatttggctttatattcttatgaataatataaaagtaaatcatatgtacaagctaggatataatcgctgtggatgtcttatatgtccttttcaaagtgattatatagatttattaactcaatatttttatccttttcaatggagtagatggatgaaaatagttgagaagaattacgaagtatgtagtgtaggaagtaatttaaaatggagtttaaaagaatggttagaaggaagatggaaacaaggtaaaagccagatttatgaaattacaaagctcaaaatgacaaaagaaagaatccaaaaagttatgaaattacttggtatatcagaagaacttgctaaaaaatactttaaaaaagaatgtttttgctgtggtaaaaaactaaatccagaagagattggaatgtcgttaaaagttgcaggacaagaaaagggattcagtaatgttgctgatgaagattatttatgtaagaaatgctattgcgataagtataatattgataaaaaaacatttaagaataaagtttttaagtatagaaaagataagtgcagcctattttagaaatgaaaggagaaaagggtgaagagaacaataaagtttattaaaaggatttttaagtataataaaaattatactttggtgaaaaattcgaaacaactttatatttgtaataatttcgaagcaagaaatagaaataaaaacaataaatataaaatcccatatggtaaaccacaatgtcctacatttaaagatgatagatgttgtggtggatgttctttgattcgtcaatgtgataatgttgttgattgcaattgcagtggatttgttaagtcagctatgggtggaacagataaagattattatatgaagaaaagtagtaagtatagtgaattaggtaggataataggaggtaaatttgattgggattattttcgattaaatacgtttaagcaagatattaaaactaaaaagttttttgtgttagaaattaataatgtaaattatatagcagaatcaaaatcaggagtgaacaataaagggttttttaaatgttttataaaagatttaaactgttataaaaaaataagctataaagatttaccaatgcattttcactttataaaacgtacaaaatagctaattcgtggagatgatttatgtcacatgaagaactaactgtaaaaatatttttggaagtagagtcaaataggggagtacactttttatttgacttataacgtttagtatgataacatgataaggtaaaaggaggatgttttatgaaagttgtatatagaataacttatccaaatggaaaaatttatattggcaaagatttgaccgatagtattaactattttggaagtgcaaataatgatttaatagaaaaagattttacaagagaacaaaaaagagatttcacaataaggaaagaaatattatgggagtcagaaagcgcaacagacaaagaagttaacaaaaaagaaattgaatatataagactttatgaatccaataatcctcaaataggatataatagatttcctaaatttaaagagaaataacgtagtagacactaaaagcgtataaaatacgaattttataagaagggaagtgacaaacaatagataacaaagcgtttataaatcaatcaaccattgataactggaatgcattgagtggaaaaataaagcaaatagaaaacctcacaaagttatatagtgacaatttaaattataagttggaaaaaatttctgattcactatataagatggaaaatgatttaaggtataaaggaggtaatgggaatgggaaagataattagctataaaacttatcttaagaatctagttattaaaggatataacctagaaattcaaaaacaaaagatattacctaagttagaagcaagaataaataaattacttgaatgggaagataatgctgttagaaaggagataatagatgataaagagaaatataagtataaataggttatctgatttaatatattgttctggtttactaaaaccatatatattcaatgacatttaccaaagagtcagggattggatttattcaggaggaacattaaaagatgattatataaaaagacaatataaatatgctgaaaatgttattaattatagaaaaaataaaaaaagaaaaaatgttttaatttagagatgaaatattataaaagaggggaataagttgaatgataaaaaaatttagtttactagttatttcattattttttgcttcacttatagcagttagcattagcgcaaggggagttcatggtgggtttcattctggaagttttcatagttcttttcattcttcatcaagtcatatatctacacattcatttagtagtaaaagtattactcattcatcaggtataaaacattctactttaagaaatggatttaaaacaggaaactttagtaaagcaccaaaaactaaaatagcatcaaagaaaagtaaaaaagctaaaatacctactattaaaaaacatgttatagttaggaaaaatataaatgtttatcacactactgtggttcataatcactattacaatcataaccatagtcactatagttataattcttatggtgggtataaaggaaatttttggagtaattattttttatatagagctataactcatagttctcaacctatttataacaatggatattatagctataggtcatatgttggtgtgaaatcggttatgtttgatgtaattacatttataataatttttataattgtagctgctattataatttttattaaaaagaaaagaaaataaagtctgaaataaaatactttgttttagtaatagtaagagtaaaaatctaacaaggaagtgtaaataatatgaaaaaaacaagaaagcaagaattagataaatgtttcataaaggcaaaaaatcaagcttatagttatgttgctgtagtaataaaaatagagggctttcctgtgccagagattatagtaaattatcaagaaaattttgataagaaacaggagtattatgataaaacttatgatgataatttaaaccataaatttgctaaaggaattaagattgtagcaattagtgtagcaaatgatttaagtgaattcaaagatttatttaagcccaacaagaataaaaaaataaaatgattttttataatgtaattaattattaacacttaatacattataaaggaaagatggtgattggatatatggaatcaaataaaaataattctaaatggaaagatattttaatggatggggaaatactccaaatagaaaatatctttaatggaagccataataagaagaataacggtcttattatatttaaaataaaagataaactaggaaacgtaaataaacttacttttgtttcaaaaagtgctgatatgtctattcaagtagaaaaagcagaaaggcttataaaaaaaggatcatattataggcattttaaaggaaattactataaagtactttatatagctgaaaatagtgaagataaggaaaaggtggtagtgtatcaggctatgtatggagaaaaaaaagtatacgtaagaccttttaaaatgtttatatctaaagtagatcattgcaaatatccagaaattgaacaagaatataggtttatgtctatatctgaattggaaaatcaatttggtacaagtgttgtagctagttggaatatgcaaaatatctatgttgaccatacgatatagtttttaaaaatgtaaggaggagttagtttaatgataaaaaaagttataaaacgtgatggtagagaaaaggattttgatatattaagaatagaacatgcaataaaaaaagcagaaaaatctatcgaagtaaacgaatgttgggatgatgatgctttatgtgacattttgatgaaaatagatgaaacaaacttgaaaaaaattgaaattgaaaaagttcaagatatagtaatagatgtcctaaataaatataataaaaatgttgcaaaggcttattcagattacagaaaagaaaggacaaaaataagacaagataagtctaatcttatgaagattatagacaagataggggtagaaaccgatagagataacgctaatgttgggaataattttagttcaaagcttcttagaatagcgagtgaatctaataaagttcataacttattaaaaatgccaaggaaaatagctcaagcgcatgagaatggagacatttatattcatgatttagatagctataatttaactacaaactgccttcatattccgacaaaagaagttctacaaagtggatttaatacaggttatggatatataaaaccaccaaagaggatagaatcagcttcggaactttcatgcatacttctacaatcaacgcaaaatgatatgtttggaggtcagtcacatcctgattttgataacgatatggctgagtttgttgagccaactagacaggaaataagaaaaaatcttagtgcaattgggagaatagataatacaagaatagaagaagaattaaaacatagaatacatcaggctatgcaaggtgtaatatataatttaaatacaatgcatagtagagctggttcacaagtgccattttcgtctataaatattggaataccaagatctaaggatgctgcacttgtatgtagaatatttctagaggaatatgaaaaaggacttggaaatggtgaacagccaatttttcctaatataatttttagagttaaaagtggcgtgaatagaaacgaaaatgatccatactattatttatttaaactagcttgtagagtcacagctaaaagaatgaaccctacatttatgaatatagatgctgattttaataaagagtattatgataaaggtataataccagcaactatgggatgtagaacctatgtatgttctaatattaatggtgaagaaggttcaataggacgaggaaatatagcacctacaactattaacttaccaagactaggtatacttgcaaaaggtgatgtagataaattctttgaacttttacattcaagacttgaaatcgcaaaagaaagcttgcttcacagatatagtgtgcttaaaaagttaaaagttaaagatttaccatttgttatgggacaaagccttatgaaaggttctgaaaatttaaaatcaaatgactcaatagaaccagttttaagacaaggaacttgggctattggatttattggacttgcagaaacacttgtggcacttacaggacatcatcatggagaaacagaagaagcaaaagaacttggatttaagataatttcatatataagagattatacggataaaatgacaaaagaaattaatctaaattggagctgttatgctacaccagcagagggcttgtctggaaagtttatagctaaagataagattcgttttggaaacataaaaggcgttacagacaaggattactatactaatagttatcatataccagttagttttggtatatctataaagaaaaaaataagtattgaagcaccttatcacaaattatgtaatggtggacatatatcatatatagaacttgatggttatccaaatgaagaaactgtaatgaatatagttaaatatgcttatgaaaacactaatataagttatattggaatgaattttcatataagatattgcaaggactgtggaaagtatttggatgcatcagatatgaagtgcaataagtgcggaagccacgatattcagggaatatcaagagttacaggatatttaagtttagatgaaagatttggtgctggaaaagcagcagaaagagctgatagaatatcacaagtaacggaaaaacatatatatagagaggaataaaaataagttatgaaaaaaataaagtgtaaagtggattttgaagatatgagatttttacctcagtataaaacggagggatcagtaggactagacttaagagcgtggagatatattttacccaaaagtaaagaaatgcataaattttcaggtgatttttatttaaaccctcataaaaggattttaataaaaacgggagttcatattgagttacctcctaatatagaagcccaattaagacctaggagtggtcttgctttagagcatggtattaccgctatacttggtacaattgataatgattataggggcgatataggtataattttattaaacacaagcaatgaaccatttgtcatacatgaaggtgacaggttgggacaattagtttttgccaaattcagaagatacaaattaaatataattgataatttaagtaatacaaaaagagcaaataagggttttggttctactggaatagagtaatgaacttataacggttagtatgattaaatgctgttgaaaaggactgaatagatattggaagatgaatataaaaaatatattgataagaagatagaagatggattaatagcaaaagatggtactccattaaaatgtttttgtgggtgtactaatttgggaaatatcaatgagtactatgaagaacattggatggtagaatatatagttaaatgtaaagaatgtggtagacaattagggcattatgcttatggttgttgggaactttaagttataaaagttaaaacaattaagaggagagatatattatgtcagaaaataaagaaaaaaaccaaatgatagataaaaacaataaaaatagtatagaggatttttttaattctctatttattacagatgaggagaaaaaagatgctgaagaagttaaaaaactagcattttattctgatggtagcatagatgatgctattgaaaaatataaagagttagaagagcagcaagaaaggtttaagtctatttataaagagaaaaaagataatttagatttaaaattaaatagccagatttctaaactagagaaacaaaagaaatggattgcttttaatctaaaacaagcagtaatgtcagataaaaataagaagaaaacaaaaactcaatatagcttgaaatttttatcaggtacagtgcaaataaaaataccacaggaaacacttataaaacctgatcttaatgaagatttgcttaaaacatttccctcatttattgaagaacagacagtaaaaactttaaattggaaaaacttaaaaactaagttagaaataattgatggcagagtttataacaaagaaactggtgaagatgtaacaggtaaaatagaaattcagaaatcacaagaaaaagtagtaattaaatagggaaaaggatatattttcaagaaatattttaacgatctaatatatgaatatctttgtaaaaaagataataggacaagcaatatggatttagaactttgtcatagcaataaggagatttttacagaaaataaaataatgcaaatgaggtaaatttatgttgaaattattaacaatattttcttagtactgtctttaattcatttattcaaaggaagtttagttgaatatttgttttttctatctagaaacaagattttaaatacttacgaaaaagatcaagaatgatagaaaaagagaatttaataaaaggttctcttataggactgttgggacttattcttgtcacaatagatataattgttgaaatcggatattatatcaatgaattaaattatgacagatacaaatatctaacacttataatgatatgtatatttattattacaatttcatttactataataaaatctactaaaaacaaaagaaaaatagacctcaataacttggaagatagagcaaagcttaagataaaaatagataaatattcaaaattaagcttggtgaatattacctttacaatattagatattgtttattatggatatatgttctatattatatttttaagtagcatgttaataaaatagataaatatatagaagattgattataaatataaaaaataaacatgtattttctgaggataaaggttagtataatattttcaaatgttaaagtttcagaaacttctatagtgaaggtatatacttaaaaagaagtaaattagatataaagtatcaggagaatctcaatagagatgaacaatataaataaattaaaatagtaaaaatgttagaaaaatagctcactaccatatagaagaaatagtgagctattttttttagtttgacattaattccatatgatgctattatatagtaaataaaatttattactgtaaggagagttttgtcatatgtgtgtctatgagatattacctacaggtgtgaagttaaaaaaactaagagagaaatataaattaaatcaagatgatctagcgggaaatgaaataacaagaaaccttataagccagatagaacatggaaaggcaagactaactagacatgcagctgaaattatgtttaaaaatttacagggaatatgtaacaatcgggatatagagactgatgaggatatagagtatttattagaggatgaggaatcacaagctaataaaatacttgatagatatataacagaacttaaggatttaagtgtttataaggatggaatgtttcaaaataaattagatgaagtcgaaaacttcaccgtaaattggaatataattgataaaaaaattattatttttgaattagctggagattacttttttaatacgaatgacttacataatagttgtatgtattacgaaaaagccaaagcattgatggataatactatttatagtgataatcttatatctattttacgaaaattgtccatggtgtatttttatatggacaaatatgatgagaacataaagtgctgtgactttgcaataaataactttaaaaacataaatgaagaatattattgtattttcatgtataatagtgcgttatgttacattaagcttaaagaatatgataaagccttaaaaagattagaaaagattgaaaaaaaagttcagagaataggtatggataggtattatgctgtcatgaatcaaaaagttgtttgttttggagaacttgagaggtatgctgaaagtctagatttaaatgaaagaataatcaataatataaataaggataactgtcaaagctatttagtggctttaattaattcaatttatattcatatggaacttaacaataaggaaaaggcaaaagaagttttaaatattgtagatgaatacataaataatttgaaccaaaacaataagtatttaccaaatacttattgtgaagtaggaagaatgcattcaaaactgaatgaaacaaaaaaggcagaaaaattttattatatagctttaaattatgctaaaaaattcaatcgtaactctttgataaaagatatactttcagatttaatagatatatatatttcactaaatgatgaaaaaagtatatcaaaaatgaaggatgagttttttgtaatctgtggaagggagaaaaaaatatctagaaatctcgaatgtaaactgatagaattttatttagaagcagaagacatacaaacgcttaaagaattatataattttaataaaagaatttcatagggggagtagatatgttctttttaaaaaagcacaaaaagtttttatcaatgctagttttaacattagtaataggtgttttggtaacaactaaaggtggaatatcaatattatcaatgtttcctgatgcaccatggtaagagatataaagtaataaggtaaaatagtgttggaattaagaagacttataagctctcttaatttcaacactattttaatatctaatggggaaagtatagcttgtatgtataagtttatgctgtttttatcttataagaaatacaaagtagatatctcatttatctttattattgatactatattgacttatgacaattagtatggtaatataactgtgaggtgaaaaggtggtgattagtattaaaaaattagatattgttggagtaataatttgttgcttaatggctatattatcttttttaggaatatggcacccaaacaggtttggagtaggatttctctggttgctttgtggatactcttataaagaagtggagttcttcaaaagaaagtgaggtgtaaatagagagtagtccttattatattaggatagctaaatgttaaaagaataaaaaaattcaatatactaataacaattagtatatgaaggagaaatgtattatgttaggaaagttatattatagaagtggtagttgctttggagagatagggaaagaaataaaaacacctaaaggagtttttcatattggagatgtaataaaaattgggaatagaatatctatatttgttgagaataagagtgtttgtagttatccatttattatggggagggaagcatctacaatagaagatattcttgaggaaaactttaataattggaaaattgttaaaagttataaagatttaaaagatggagatatttattttgataattgtattcaagtgtttctttttcgaggagaacttaaatataaaaaagatgaaagcttttatggatatattggggattacgcatttaaaaatcaaggagaaatatttagagtgggagatgtaatagatatcatatgtgggaagaattttattataaaaaatattaaaaatgaagcttttataaatgggtttaaaggatcaagtctaaatggtaaatttaacaatttgtatttaggatataaagagaagtttaaatctttttctgatatcgctcaaggagaaaagtatggttttgtagaagcaaaactttttaataattctcaagctaaacaaagtgttgttttaaaagtagagttaagacaaatgagtaatttaattattggaaggatactttaccaagatgaggagattattaaaagaggaagttttagattcaaagccaccaatggtattaatttaaaaagtatagattctccttatatgtcagagcataatttgtatttaaagggaacagacgataagggtgataaaatgtttttttcatatgatgcagaaactattgaacatgctaaagaagtaataaaaaatataaatgtggctattgaagagttaaatgaaaactataaaaaagaagaaagaaaagaagaaaaaataaaaacatctttaaataatttatttaacataaaagacttgaaaatatctgtagatagaaaaaagaacgtaattattattaagatgggaaatgtatcacgaaagtgtctttttcaagatataaatagaggtaatttctcaatcaatagggtaataaaaaaattagtgttaatactacttgaagaagaaattgaaaggagtgagcgttagtgttaattgctcttatgggtggatcatgtgttggtaaagatacagtattaaaaatgctttatgctgccacaggtattcgtatttgcatttcaaatacaactagaactattcgagagggtgagcagcaaggtaaagagtataattttataactgaaaaagaatttttgcatggtttatctttagatcaatatgtagagtatcggaaatataaaacaaaagaaggaatatggtactatggattacccaaaattgcagtaaacccaaaagtaaaccaatttattattgttgatcaaggtggatactatactttaataaataaatttggaaaacaaaatgtaaagggtatttttttacaatgtcctgaaaagacaaaaattaaaagatttttagaacgagaaaaggaaaaggttaaaagtaaccgtaaggatttttttcttgaattttacagaaggatgttagatgatttaactgcatttcaaaaagtagaattagatcctgatatcgaaaaggtatatggaaaaacatctttggaaaattttttaaaagttaaaggaatgttagctaagtggggtgttataaatgaataaaccaacattaggaatagatttagatacaactctaaacacgttagatagagaatgggtaaaacgatataatgaaatatataaggataaattattgccatcagatataaagggctgggatatagaaaattatgtaaagcctgaatgtggtaaaaaaatctatgatatcctgaaagaacctcatttctttagaaatttaggtgtgcaaccatttgctgaaacagccctagaggaattaacatcaatttttaatatttatattgtatcagcaacacattataaagtatgtgaagataaaggaaattggattaaagagaagttcccttttatatcttatcaaaatattatattttgtcataataaaggcttagtacacttagatattttaattgatgataacccactaaatttagaaaactttaagggaaataaaatcttgtttgatgcacaccataacaaaagcgaaaacaggtttgtgagggctagagattggtatgaagcaaaagctttatgtgagtcattaaaagatttcttgtaaacaacttatgacatttagtatataaaactaagattttataaataattgtaaaataaaatcaatgaaaggtcgaattttatgggaatggatatcagtatatataaatttaaaaatataaaattaaaaacaaatgaagaatatcaagattatattaataaagaaggatgctctaaggaagaagagttatgctattggagaaaacattattggataaatgattggtttaagaaaaatgcaaaattttcttttagggatgaatttcttttaataaaagaagatatctataatttttataatttttgtaatgaattattaaataagggatatgaaaaatacaatataaacaaagacgatttctattgtatgagaaatggagatgttatagaaaatatagatttgattcaaaaagagataaaaaagacaatagaacaaataaaacctttattagaatttgatattcaaaacaatacgcttgtttatgatatgagttgttagtcaatctaatttaaaatgtgaggtgaaaattttgcatattaaatttattacaaaaaaggaacataaggtaaaattagaaaattatataggtaaaccaattatcaaaaaaggaactaaagattatccaattggagtaattactaaagcaacagaacacattaatgataatggttatataacaattgaggctgaaatatgggataaatttatagatataaaaaataagtatttatcaaatgaaaactattgtagtatatcgctagagtttgaaggaagattgaaatgaaacgagataaaaaagtaacaacatatcctaatattaaaataattaaacctttcttctggaaagaatgtagattttgtcataaagaatttaaaaaagaacaaggctttgagatagaggatttatgtaaagtgcagaggagtttatatagaagtatatctgataaatacaaagatattttttcacttattgttgtaatgattgctgtaaaaccatagaggaagttaaagagaaaattacaatagagaaggaaaaagcatcaagaccaccatctgatccatcttgtcaatatgggattaaagataaaaaatagaatttacatgaagattggaggaaaatattataataaaaacgttagagctattcggaggaataggcgcaccaagaaaagcatttaaaaatattggaatagacataaaggctattgattacgtagagatagatccaaagccagtaaaaacttataatgaaatgtttaaaaaggatttaatgtataaaacgcaaaatgtcattggatataatctcaaaccagatgttttgatacatggaagtccttgccaagatttttcaatagcagggtatcaaaagggagcagagcaaggtagtgagacaaggtcaagtcttatgtgggagactatcagcataattaaacaaatgggtatttggaaacctcgagttgtagtatgggaaaatgtaaaaaatgtgctatcaaagcacatgaaacataactttgataagtatttagaagaaatgaaaaaaatgggatataccaataactatgaaatactaaatgctatggattttggactgcctcagcgtagggaaagagtttttacgattagctgtttagatggtaaaaaatttgattttgataaattggagcataggaaactaagacctttatcatcttttttacaaactaatgttgatgagtactatactgttacccaacctagtattctgagagccataggtaaaaaaggtgtcagtagagccacaataataaaagattattgctatacaataacaactcgacaagataggtgtcctgctcaagttatcagtctaggaaatggaaaatatcgttttctaaccgaaaaggagtgttggttattacaaggcttttcagaagaagattttgaagcagccgcaaaagtgaatagtcgaagagatttatataagcaggcaggaaatagtattccagtaacgatactagaaagtattttcaaacaggttttagaggaatggaataataaacaaatagctgtgtaaaaaaggaactaagaaagagtaccctcgatatctactttatacagaagatgagaatgtatataaaaggatagatagattttaaatcaaggagtggtgtgtcaatgagtgattgtcagatagtagatacaataaaagaaaagcatacttattttgatggaatttgttattttactataacagatagtaaattttataactgttgatgaaaagaagattagactaaagaataaaacatgttgcactaaaaatgattaggacttgtgacatttagtatattgaaaggaagatgataaatttatgtcttacgcagagttgcattgccatgactgctatagtttattagatgctatatctaaaccagaagagattataagcaaggcaaaagaatatggatattcagctattgctataactaatcatggcaatatgttctcaatggttaattttcaaaaagaaggagagaaacagggagtaaaaactattttaggaatagaagcttatgaagcagacaatttaaggataaaagacgatacaagataccatttaattcttctagcaaaaaataacgaagggttgaaagcactttatgaactatcctccatttcttatttagaaggcttttataaaaaacctaggttagatataaaagaaattgagccttatgcaaaagacctaattatatctagtgcttgcatggctggaagaatagataggctattattagcagataaatataatgaagctaaagaatggatttataaatataaaaaagtatttcccaacttctatttagaaatgcagcatcatgatgtaatagaacaagccaatctgaacaaattaattgtaagattaggaaaagaaacaggtacaccatatataatgactagcgattctcattatattaataaagaagatcaaaaagcccattctatatttattcaaacaaatgaaaaaagagaggttggagaaatatatgatggttgttatttgaaatcagaaaaagaaataaaagaaataatgatgaaacaaatagacaaagatgatatagaacttgctataagtaatactgaaaaaatagcaaaagaatgtaatgtaaaaatagatttatcacttcctaatcaaatgccagaaatacccataccaaaagaatttaaaaatattaatcaatattatatgtatttaattaataaaggatttaaggaaaaaaaattaaataaacttcctaagaatgaattgaaaaaacatattgaaagaattaaatcagaatatgaagttttagattatgttcattatatagattattttgtaatgttatatatgctaaccaaggcagcaaaaaaaagaaatatacctcttggatttagtcgtggttcaggaggaaattgtttgacattgtttgacatgggggttacaggaataaatagcttaagatataacttagatttttcaagatttgcaagtaaaggtagaacttcattagcagattatgatatggatatgtcaaaacgtagaaggaaagaaattatagacatttcaaaagaattatttaataaatatgaagatattcttcatacacaagtagctccgatatgtacattcaattcattttcaacgaaagttgcctgtagagatataggaaaagctcttcaggtaaataatacttatcctgatttaacatatcaagttagggacattgttgcaaaaatgattccaaaagttacaagatatgatgaagaaacaggagaagctatagaagaagaccagcaattaaaaagtataatagattctaatgaaaaattacaaacttatgctaaaaaatatccattatggtttaaatacattataaagttagaagggttaccaaaatctttaggatgtcatgcatcaggagttgtcatatcccctaaaccaattatagattatgctccattgtgcttaaacaaagataaacagccaatgattcaactagaaatgcataatgttttagacgatttacatttagtaaaaatggactttttaggtttaaaaactcttgatgttatagatgatgctttgaaattagcaaaattaacttatgatgatatagatataaataaaataaatttaaatgatccaaaagtttataaaaatatctataagaagggcaacacaataggcgttttccaaatggaaagtgcagaagctcgtcaaatgaatattgatgctcagacagataatatagaagatgtaattgcacttaatgctcttaatagacctgcatgtaaagctatgtttcctgattttgtagaaaacaaacaacatccagaaaatatgaaattaattcatgaagatttaagatctatattgcaaagcacatatggagtattgttatatcaggagcaatctttatctatattccgattagcgaattttcctgattcagaggtggatttagcacgtagagccattgggaaaaaagatatggaaatcatgaaatcgcttgaagaaaaattgagagataaagtagtaaaagatgaagatggtcatattctatggcattatggactgaagcaaagaggatgggcagataaacaaatagaagacatatggaaacttttattgaaacaagctacttattcattcaacaaaggacactctactgcttatggattactttcttatattacagcatggttaaagacttattatcctactgaatttatgacagcgctattgaattcagaaataggtgattatgaaaaaattgcgaagtatataattgaatgcaagaaaatgaatgtaaaagttatagaaccagatataaataaatctatagattttttctcaataagtaaaagttctatattattcggaataaatatgattaaaaatgttggagattctgttattccagatattataaataacagaccataccagtcatttaatgacttcataacacgctgcaatataggtaaacgagctactatagcattaataaaatcaggagcttttaatgagtttaataaagataaaagcactcttttatacgaatattgtaaatcagcatatacaccaacagtatataaacctgtaaaaaaccttaaaacaaaaaaacaaatgtttgagttaggtttagttgaagatgaaattacttggaaagataaagatttatgccttgctaggttaaatgcatacaacaagaacaagtatattaaaaaagaaaaagaaagatatgagaaatgttataaagaatttgaagaaaaatatatgcaaggtagtatagaagattggcaatttgaaactttgtctatgtatttaacagttgatccatttaaagaacttaggaagatactaaaaccatttgatgatatgggagaaggtattggtttaatagctggaactatttttgcaatagaaaataaagtagataaaaaaaataataaatatgcttttgtatcacttataaatcaagaaagtaagattatagaagctgtaacatggagtagtatttattctcgttatcaggaatttataaaatcaggaacaaaaattatgtgtttaggaaagaaaaaagacacgctgtttagtatagatgaaataaagttactagatgaatggaaaaaagaactaaaaggaagtgtgtacaataattagaaaaaaggaaagatactttataaggcatataaataaaagagtttcttacgcagacagacaaaaaattaaaagaactacgtactatttgttttgggttattcctatctttattaaagatgaaattgttggaggtgattatgaaatttaaaagactacttctaacaaaaagatagtaaaaacaatattttgaatgaatacttcttaatatattaaaaaagtattttataaaaatacaacagaaagagggtattttgtggctataaatacaggtaaaagatttgaagaagatttcaaaaaatctattccagaaaaatattgtgttattagattaaaagatagtgcttcatcatggaatggtggtacaagttctaggttcaccataaataatccatgtgattatattgtatttgccaacaaatggttacatttagttgaactaaaaagtcataaaggtgctagttttcctatagcacctaaatataaggaaaagaaacgaatgaagaaaattaaaataaatagaaagcaatggtacaaaatagcgcaagtaatgcatagttttaaatttttaaatatagagaagtatattcctaaaaaggttagcaattatggtgttattaaacctaatcaaattaatgatctaataaaatatcataaaaaagagaatgtaaatggaatatttattttcaatttatctgaaaaagatagaacttattgcgtagattgtagagaagtcaagcaagctatagatgaaaataaaaaaagcttatccatggaatggctaaatttacatggaattctcttgaatcaagaaaaaaagaagactagatggaaatatgatctatcgcctatgtttgattaacaaaacattttaagaaaaaaatagttaacgataaggtagtggaagaattaataaataaatgttaagttaagtaaaaaaatatgggatagtacgcaattcaaattatttgaagctagaacaattagaaaaggagtgaattgatgaaaaaaaggagttttaaaaaatatattcccaaaggacgattttgcttaggatgcccttataaaagactaattaaatcaagagccaataaatctaactgtaatttatcaagtatatgtaaaaataaatgttggtcttccgatactacaaaatgtataaaagagatatatgcatgtaaatatatcggtatgcaggatggcgaaagaagaacaggattatgggatgggttcaaaatatgtgaagaaaaaataaaatgacttatagcgtttagtatgataaaatgtattcaatgagtaaaacggagatgataaatttgaatataaatgagagaaataaagtagtagaaaaatacatgacattggtaaagagtatcgctagaaaatatataaaccgttctggaactctagagttagaggatatggttcaaagtggtgcaattagtatgattaatgctgtggaaaactttgattataataaaggcgtaaagttctccacatatgctaggcattgtgttgaaggaggtatgaagaattattgtaaaaagaatgaacttatacatctctcagaatatcaaaggaaagatctgagaagaattaaaaaattatttgatgagaaacaattggaaaacaaagatatagatataactgaaatttctgctgaattaggaattgaaaaagaaaaagcaataaatttaatttgctttttaaataaggataagtatattcccatagatgattacgaatataaatatggaaaaagttttgaaaaagaaattgtagataatatattaataagaagcttaatagaaaatcttcctaaaaaccagcaaaatttaattcgagaaagattaaaagatatgtcttttacagatataggtaaaaagtataacataacaagacaagcagtccaacaatctgttaaaaggataataaacaaaatgaaaagagaactagaatatgcttaagatgaaattaattgaagtaaatgaagaaaagcaacaggagattttcaagataaacaattcagctagtaatatatctaaggttcaatttactcatataggaggagaggagcagaaaactgatgatttttttaaagctttagcattaggatatttaagaaggaataatctaattgactaataaaaaaaaaggtactacaattttatcatagagtagatacgattatatgactactctatgattttttataatagggagaatttagaatggaaaaaataatagagaaaaaagaaaacttaaaaaaggtatatggttacgtaagattaagtagagatgaagataaggaacaagcatccttagaaaatcaaaagcaaattattagaacatatgcaaagaacaatgggtatatattagttaagatatttgaagacgacaatgtctctggaatgacctttgatagagaaggtttaaatgaattaaaagaagttattgaaaatggcaatatagatattttacttgtaaaggatttatctcgtataggtagacacaaagcttattctgctttatttatggaagaattaagatctaaaaagattaaagttatatctattgctgaaaatcttgataatatggatgaaaataatgatatactaatagggttcaaacaaatacttaatgaacagtatgctaaagatataagtagaaaaatcagagcagcgtttcaccaaaagcaaaaggagggattagttatagtaccaccatttggatatgaaaaaaataatcagactaataaaatagagattgatgaagaatgcgcaggtgttgtcaaaaaaatcttttcattatatataggtggatttgggtataaaaaaatagcacaacagttaacagaagaaaaagttcacacaccatcttggcatcagtttcagaaatctggaaaagtatatcacgcaggaaagaagtggatcggacaagatatctggagtgatagaacaatagcaagaatactttcaaatgaagcttatattggaacacttaaatgtcatactacgacaagaagcgttatttataaaacaaggggtttaatacctaaggatgaacaaataatacatgaaaatttttacccgcctataatagatgaagaagtttgggaaaaaacaaaagctattaagaaaaatagaacaagaggtcacgttagggcttcaggtaatagcaaaatacataagtacgcaggacttcttatatgtaaggattgtggtagtggatttgttgctaaaaaaagaaaatggaatggaatagaacgcattgaatatatttgtaatgcatatcacagatttgggaaaacagtatgtacaccacatagaataagggaagaagaattagataatatcttatgtggattcttagagagattaaaagaaacatgtgaagaaaatttaaatcgagcagataaatttataacaaagtggaatagtaaaaaaagaaattatgataaatctatagataagattcaaagagaaattttttctttaaaaaccgaggttaaggcttacgcaaagcaattagcaaaacaacttataaatgaagaattgtttcaagagttgacacaagaaacaaaagaaaaaattgatatactagaaaatcaaatagatacttttcaagaggtaaagaaaataagtaaaaatgcaaaagcaggactattgaaaagcaaggaaataatagataaaataatcgaagaaaaggacttagttagtgcagatttacaaatgttagtagataaaataatagtccatcaatcttgtacaggggaattagaattagatataagagtaaacactcctttcaaattacattcagaactaaaatctacttttactgtcatagaggagcagtccagttgaggggcgtgtgggataaccgtacgggttcaagtcccgtccttcgcaccaaaataaatgattttctgaagtatttgtgaagctcttattttgaacctacagttcaaacaagggagttcaatatttagatgagtatatgtgcttcatgtgaatccttttacggtattgaatgagatagatgcatctgtgaggacacccacctatcgtagagataggtgtcaaaattggggtaacggtattttggatttacatttgaatgtagagagaggttttaaagacctctctttttttattatacttaattataatttttagtgattttaagtgaattttagtaacatatttacaaaatatacatgattgagttgttctacataagaagataaataaatatgtatataataaatagtttaaaggggaggacttctaccttgaaaaacgtttatgattatgggatatatgctgttcgctatgatggaaatgacaaaaataatcttattcaatctactaaagtttgttttataaaagataataatgtgagtatgcctgttgaattttcaagagattttttaattgctgatatagaagatgggaataaatattatactatgtataagaataataacaagtgggaaaggagagaaattgtaagtatagagtatataaaagggaatccatatgttaaaataagattagatggtatagagggtgatgatttaggagagcttcctaattattaatgataacatttacattgtataccaaagaaaacaaggaggtatttttatgagtgaaactataagatttgggattgtaggaacgagtagtataacagaaaaatttttagatggatctaatcatgtaaaggacttttctttaacggcagtttattcaagagaagagagtaaggcaagagattttgcaaaaaaatatggagctgagaacatatttactgatttagagaaaatggctaaaagtgatttgatagatgctgtatatattgcatcaccaaatgcaatgcatgcaaagcaagctgaggtatttcttaaaaataaaaagcatgtactttgtgagaaggcctttgcttctaatgtagaagaagtaaataaaatgataagtgtatcaaaggaaaataagatggttttaatggaggctatgaaaacagaatatttgcctggtttttttgctgttaaggagaacctccatagaataggaaaggtaagaaaatattttggaaattactgtcagtattcttctaggtatgataaattcaagcagggcatagtcctaaatgcctttaaacctgaattatctaatggaagtattatggatataggagtttattgtattcatccaatggtatatttgtttggagagccaaataaattaaaggcaaatgctgtgcttttagaatcgggtgtggatggggaaggaagtatattattcaattatgataatatggaagctgtagttatgtattcaaaaataactaattcaagagtaagctcagagattcaaggggaagaaggaaatatagtaatagataacatcaatacctttgaaaaggtaaagatagtatttagaaatggagaagaggaagatttgtccagagtacatatagaagataatatgtgctatgaacttgaggaatttataagattagtaaaagaacaagatactaaaaaagcgctacagagacttaaagtttctaaaagtgtaatggaaattatggatgaggcaagaaagcagataggacttgtgtttccagcagataaaaactaaattttccgttgaatagaaagtaaatagtgtaagaatgagatggtagataataggtagtaaaaagtgatatgaagtataaatttaattgtggatggtattccaatacctagagataatcataagattgatattaaattatatattgaaaaaaagaatagtataaataagttataaaggcatgtataagcattttatatatcattagaattgaaaaaaggagacttgatttaaaaattaaatattccttagcttccataaattttacatagattaggtggattttatctgttagaatcttagctgtaggatttaggctataaatccttaagagtgccgaatcttaataatatttaagtacgggggaacacattgtgggtgaatcttacgactattcgtaagtagggtgccttcaacccgaatccgtaagctaacctcggaggcaaaattgataaaggaaattattatcctttatcaataatagaagggagaaaaatatgataaaatctaagtttaaatttcttgtttttgcagcggctttagcctttgtaggaatgggaaaaaatgctgtacatgctgctacctatagtgtaaaaagtggagatactctttatagcataagtagaaactatggcactaactataattatcttatgtcggctaataaattgcagacaagtgctatatatgctggacagagccttaaagttccggatgtgaaatatactatcaagagcggagatactctctatagtatagctaaaagatttggagtattacttagtgatttacaacttgcaaataatatatcaaataatattattaaagtaggacaagttatagtaatacctgttaatacgtccacagcagccactcctagctatgtgatttcttgtacaagctctgaagtcgatttattagctaggcttattaatgcagaagctggtggagaaagttacaatgctatggtatcagtaggagctgtaatcgtaaacagagttcaaagttctgcttttccaaatactgttacaggagtaatatatcaagtatctaatggatattatcagttcacgcctgttttaaatggaatgattaataaaggtgctacagcttcatctttaagtgcggccaaggcagctctttatggatcagatcctacaaaaggagctttgtatttttatgataataccgtatcaaatacttggcttacatcaaaaccagtatcacttgtgtctggaaaattaatatttgcatattaaatgaggtttattatagatgtacaagccactctacgtagaagcttgtaaaaataaaaaagatttagtgagaatataatttcttgttaaatcttttttttttataatatatagttagatatagaaaatggaattttaatgtgttagcaataattaaggggatgtcattggaaaatgttactagatgaaaatggaggctatttgagatattagtaatatggcaatgttattgcaaatgcagatttaattaatttaatattttagtatgcataagctaattactttaattatttttattgtataatggctataataatttacataaaatctacgatatatattattgaagctagttttatatagctgtacatgttcaataatgtctttagaattaatattttgtaatcaatgtagattaagttttagtgtaataaaaccagttcaactatcaatttatgaatactaaatatggatgttatcagtgtacataggttaagatttatcttggttttatcaagtagtacttctaagcttaacttattaatatatgagtgtattgtatgaatatgaaataaattgaaaggtaggaagctattatggaaagtaatatattattggaatcaggaacgggagaattagaaattcttgaattcgtaataggggatagacattttgctataaatattataaaagttaaggaagtagttgaagtagacggaggaaaaataacaaagttgcctgaaactaatcctgcaatagctggactgatattgtgtagaaacgaaataataacccttgttgatttaaagtatgtagtgaataagggagcgaaagttgaatcatgctcaaaagtaataatatgtgaattcaataaggttagggttgcatttaatatcgatgcaataataggcgttcatcgtgttaaatgggaagaaatattaaagccagatgatgtttctgaaaattcactagttatagcacacgtacttttgggacaaaaaatattattgatgcttgattttgagaaaatagttacagatataagcccaagtacaggaataagtcaggaaagaataggaaatatagaatataaagatagatcgaatataaaaattgctatggcagatgactcaacgcttataagaaagcttataaaggatactttaaccaaggctggatttacaaaattggagttgtttgatgatggaaaacagcttttggattatcttgaagcaatttcaaaagaaaaaggcgatagagtaacagatgaggttcaattagttataacagatatcgagatgcctcaaatggatggacatgcacttacaagaaagataaaagaaaaccctcttcttagaaagcttcctgttataattttttcatcacttattacttctgaattaaagcataagggtgaatcagttggtgcgaatgctcagataagtaagcctgaagttggagagttggttagaattatagatgaattagttagtaaatagtgatcttcattaacttattgatattgtttgaactaaataattaagtgcattattatttaaaaaatgccatttcaaaaagtattgattttatttttttatatgttataataaacttaagtaaacgtattaatgctttataaatcaaatatcttctagagtatacgccaagctcttatcttgaacctacagtttaaaaacgggagttcaatatataaatatggatatggatttcttatgttttaagaaaagatagaagtatttttgcgagcacccacctatcattagataggtgtcaatgaaagagcagcggtattttggatatatatgtgtgagaagagaggtggatgcctctcttctttgtgttttttggttaataaatttaagtttaagataaagacaataaaagttactattctatttcttgggaaatatatacgtttattttagaagtagagatgaatattgtttttaggtgtactttgtgatattattagtacattagttcttgaagtgcatacaagtgtttgttaaataaaaacatggaagtggtgattaaaattagtacaactgaagctaaaaagtatttacttattgatacatctgtacttcctgatgtatttgaagaggtcatacaggtaaaggaacttttaagatcagcaaaagtaaaggatattacagaggcggtcaagaaagttggcataagtagaagtacatattataaatataaggactatgtatttaatgtttctgatggacttaaaagtcaaaaggtaactatatcaattttaattgaacatagaagaggaaccttatcagaagtattagataagcttgctcaaagatgctgtaatatacttacaataaatcaggatatacctataaataatacagctaatgtcaatattacttttgatataagtggtatatcaggagacgtaaaaaatattgtagaggaactaaagaaaattaaaaatgtgttgaaagttgaaatagtggcaatggaataaaacaatattggggtgttaaaaaaatgattagagttaaaatacctgctacaagtgcaaatatgggggctggatttgacacactaggaatggctctaaagctttataacgaaataactatagaagaaacagaaggtgaaactgagattaagcttttaggtggtgagcttgatagaaattataggaataatttaacatacataagtattataaaggtatatgagttttttaataaagaatttaagggctttaagatagatatgtctaaaactaatatacctctttctagggggttaggaagtagtgcagcatgtattgtaggaggcatagtgggagctaatgcacttttgaatgaaaaaatgaccattaaggatatgcttaaaatagctgtggatattgaaggacatccagataatgttgcaccagctcttttaggaggagttataataagcataaaggatatggaaaatataatatattcaagaattaatgtgaaatcacagcttaaatatgctgttatggttccggattttaaggttagtactgagctttcaagaaaagttttgcctaatgaatattcaagggaagatgcactttttaatatatctagatgttccatgcttgtatctgcattaaataatggtgaaaatgaaaagcttagatatttatttgaagataagatccaccagccttatagaaaaaaacttataaataatatagatagtatttttttaaaagcaaaagaatatggatcacttggtgaatttataagtggttcgggatctaccttgattgctgttttagaagaagctgatgagaacttcattttaaagatgaaaacttatcttgattcgctgaaggatgggtggaggatatttgaggtagaaaacgataataatggcgcagttataatatagtttagtgaaaattcatcttgttttattagcaaggtgaatttttctttttaaatcataaaaatattatgaaagcatatatatatcatatagaaaatagtttaattaacaatttacatacacaaaaatataagttatacataaatttaatattttaggaggaatgttatggattattatgaaaatgactacgaaaataacatgaattatatgtttaatgaaccttgtgacaattgtttttatggctttaatccttatagggaaagttacaaaagagcttattctggctttagctactatagagcaccttttggtatccctaattttaaagaagtgagtgaagaagaattatttgattagtattatagggcttcttgaattaaactagaagccctataaaaaattaaaggataatttgctttaatatagaattaaaattctagaggtgaaattatgtttgatgtggatataaaatttggagacgtatatgtaaggaatatagaagaaaaagatataggtgaattaaaagaaatattgaaggacaaaaaattttacctaaatgatgaggaattaaaagaaatatttttagaatactatatgagcgaatgtgagttttttactaagatattaaaaaaaggaaagtttgtaggggtatttagagggagaatagaatttaagagcagcaatatggcttggatatcttacttctatgtagatgaaagatacagttcatataaagatagtcaggatatattgatgaatatattagagtatttttctgaaagcttcggagtgactgattttataacaggagtcacgaatagtgaaaaagatatgatagaactgtgggaaaataacgactttaaaactgttagaataaataaggaattttattcagatagaggatataaggaagatttagttataatgaaaaagtatagtgctatataaattggttttaattacatataatttttatgtataattcataaattgtacttagagttaatatacataacatagtgatattatactttaggagatgagaaaatgagatatacaagatatgatttaaaacataggaaaagcagtagcataccatttttgatgtgcttaacaattattttggctttatcattttttataggaacattcatttttaagacgtttattaaaggaacagaaggttatggtaatccacaaaacatatctaatgactatgggaaaaaagaaaatgggggaaagctttttataatccaatgttctgctaattcaaaaaaggagaatgcagataagacacttaacagtttagagaatataggaaatccttttgaggttaagagcaatggtttgtataagattatttatgcaatatgtgctgaaaaagactattcaagttatgaaaaagctattaaagataataagattgaatttaataaattcactattaatcttaataaaggggacccgggtgatgccgaattgtatagtataattagtgcataccttcaagcagtaaacaagttaggcgataaggatgtaaaatcggtacaaacggcttctttgaaaaaatggtgttccaatattaaagaatatgatgatacgtacaaaaattataaaattactcaagaaataaagaaacatattgaagatcttccagctggaattgataaaaataatttaagtaatgaggaaacttttctttataatgagttagttaagataaaatagtaggagagatattaaaaatctactcctttttttaaattaaaataaaaaaatctttaataattttttaaggacttgtttaacggtatattaaatgataaactataaaagatgtatatttgatgtagggagttaataaagtgaatggtaagactttcaaaaatgttttgtttttgtctctaataggatgcgtaggcggttctttagttggagatatactcggagaacattttactaagattgattttttgaaaaaagcatacagtattggtacggtaaagccccttgtaattgaccttaaggttttaaactttactttaggattaaattttaatgtcaatttaatgtctatattgggcataatagtggcaataataatatacagtaaaattaggaagtgaaaatatgaaattagttttagcttcagcttcccctagaagaagggaaattttaaagaatattactgaggattttatcgttgtggcaagtgactttgatgaaagtctgattgagatttcaagagacattcaaagttacgttatggttttggccgaatcaaaggcgaaaagtacactttgcagaattgaaagtgaagatttctataaagacgaagatgaggtttttataattggctgtgatactgtagtttcaattgatggcaaaatactcggtaagccaaaggatgagaaagaggctttagatatgttaagtgaacttagcggcagaacacatgaagtctattcagggttagcggttttagatgctaagaaaaataaaattataaaagattttcagtgtactgaggttaagttttcagagatatcatatgaaactatattaaaatacatagcatgtggtgagtatgcggataaggctggagcatatggaattcaaggaaaggcttcggtttttgttgaagagattaagggttcgtactataatgttgtaggactgcccataaataaattatataaaattcttttggggatgggggtaaatctataaacaggagattgatgtattttgataaataacagtctaaagattacagatttacctaataatgaaagaccaagggaaagactcttaagatacgggagtgaagtgctttcaaatagcgaacttctagctattatacttagaacaggaacattacatgagaatataattaacttgagcagcagaattttaaaggaaagcggaggcttaaatggagtattaaatttaagcttcgaagaacttaaaaaggttaaagggataggaaatgctaaagcagttcaaatcttagctttaggagagctttttaagagatttaaagcatataagtcttttgaaagtgtaaaaataacatcgcctaaagaagctgctaatcttgttatggaacaattaagaagttttaataaggagcatttatatgtcataatgctcaatactaaaaatatagttataaagatatctgatgtttctgtaggaagtttgaattcttctatagttcatcctagagaagtatatgtagagccaatattaaagcatgcggcatcaattatattatgtcataatcatccgtcaggagatccaaagccgagtaatgaagacctaaatataaccaaaagactttatgagtgtagtaagttcatagggatagaactcttggatcatataataattggggacggtatatatataagtttaaaagaagaaggattattataacgaagattgtgaaaggagataaattaatgggattttttggaatatcaagagatatgggaatagatcttggaacagctaacactttagtttatgtgaaaggcaagggtatagtattaagagagccttcagttgttgctattaatactaacaataaagaggttcttgcagtaggaaatgaagcaaagcaaatgataggtagaacacctggaaatataatagcaataagacctttaaaagatggtgtaattgcagattttgatattacagaaagcatgcttaagaactttataagcaagataagttctaagagtgcatttgcaagtccaagaattcttgtttgccatccgtcaggagtaacagaggtagaaagaagagctataaaggaagctactaaaagagcgggagcaagagaagtaaaggttatggaagagcctatggcagcagctataggagcaggtctacctgttgaggaaccaagaggaagtatgattgtagatataggtggaggtaccacagaagtagccgtagtatccttgggcggaatcgtaacaagtaagtcacttagagttgcaggagatgagcttgatcaggctataatcagctacataaagaaggaatacaatctaatgataggtgagagaacttcagaaataataaagatgaaaatgggatcagccttcaaaacagaagagtctttagagaatatagttataaaaggaagaaatcttgtaacaggattgcctaaaaatatagaaattagtgaagaggaagtaagagaagcactaagagaacctgtagcatcaatagtagattccataaaattagcccttgaaaaaacaccaccagagcttgcggcagatataatggataaaggaataatgcttgctggtggaggagcacttcttaaaggacttgatatgcttattagcaaagaaaccaatatatctgtacatatagcggaatcccctcttgactgtgtagcacttggagcaggaaaagctctagaccattttgaaaaattggttagcgactaggtggtaggatgaagctatttaaaaacaggctgacagtaacagttattgttctgtcagttagctttttgttattgatttcatacagtgctaagaggaaaaaggtttctttcgtagaaaatggtgttggtacagtgcttaattctgttcaaggtttcttttataacattaatagtgatattaaagggtttgtaggttttgtatcaaacttttcagaagttaaggctgaaaaccaagaattaaaaaagaaaaacagtgagcttaagcaaaaggcagcttcatatgattctcttaaaagagagaacaccaagttgaaaaagatgtttgattttaaacaatctaaatctgaatataattatgttggtggaaatatcatacttaaaagtggagctgatgccttaaaaggctacgtgataaacaaagggtcaaatgatggaataaaggttggaatggcagttattaacgatgaagggcttataggtcaggttacttcagtagcaagtaattattgtaaaatagaaactatttcaagtgaaaatatatctgttgcagcgttaattcaaagaactcaggttaatgattgtattgttaggggatatactgataatgaagataaagagaaaaacttatcaatattaactatgcttcctttaaattcagatattaaagaaggagatactataacaacttctggaattggtggagattatcctcaggatataataataggaaaagttaaaagtgttgaagacaacaagggtaaaatggaaaaagaagctataattgaacctgcggttgactttacaagacttcaaaatgtattcatagtagttccaaaagatacaagcgaaattaaatattaggtgatgttttatgagaaaaattttaacactattattatgtatattaggtttcacatttgtagataactgtatagctccgtttatagctattagaggatattatccaagttttctcttcgtttttataataagctacgctataataaatgaaggctggcaggggattattattgctctagcagccggatttcttcaagatatttatctttttaatggtattggagtgaatttgtttataaacttaatactatgttatgcagctggggttataggaagaagcttatttaaagaaaaagcttttattccaactgtaattatattcttcatgtccgttgcgcgaggtattttgatgtttgttattctatacttatgtggtagttatagcgatataggttctagcttttatgcatctatctatgattttattattgctataccaatgtatatttgggtatataagctatgtcaaaagaggtacatgataacaaaatggagattataaagaaaggtagtaaagctaatgaaaaaagcgaaactaaagaaaatatttaatagatttaatgctttaatggtagttgtactattggtcttttcgggtattattgctcaacttataaatcttcagatactacaaaccgattcttataaggcaaaagctaatagtacagctcatagatttataaaggaagttgcaccaagaggagagataacagattctacaggaacacttctcgcaaccaataaacagagttttgatgtcacttatcttcaaacagatagtaataaaggaaatttttataatacagtggctaaggtgttctatattttggacaagagtggtgaaaagcaaaatgacagctttgcacttaaggttgattctaatgaatatagatttgactttaatacaacaaatccagatgaaataaataagatgcagcttagatttttaaaagacagaggttttgaagagcctattattaaaaaaatgtataagggaagatcaaaggaagatgatctgacaaaagatcaaaagaacaatgttaataatgaactccttaagatttctcctaagaaggtttttgaaactctagctaaaaattataaaatacctaaatcatataaaataaccattgatggacaaactataagcaaaaattgtgatgtaaatgatattagaagatttatggtagtagaagatgcagttaagatgaatagtttttcaggttataaaccagttgctatagcaagtaacgtaaagcaggagacctcatttactattcttcaaaaggcaaatgagcttccaggaatagatgtatcagtagatcctataagatattatccttatggaaaactagcatctaatgttatgggatatataagcaaaataacgccttcaagtactcagcagtctgaaagttatacacaaaagggctacgatgttaatagcgatttaataggtgtttctggattagaggctgcacttgaggacaggcttagaggaacttcaggaggaagaatagttgaggtaaataagcaggggaaaataactgacgagcttgctaaaaaagacccttatccagggcagaatgtacaattaactataaacaaggatgtacagtatgcagcagagcaggcgcttataaatactatggcaggattaaggaaaaaaggatattctgatagtggtggcggatcttcatatttaggaaatgctacaagaggagctgctgttgtaatagatgtaaagacaggtggagttttggcgctggcttctgttcctaactttgatcctaatgatttttcggatccaaatggtctttctgaggctgctaccgaaaagtatttttcaacggatcttattgcaaaagcaaaggctgcaggagttcctgaaagtctttatgacactttatttcccgtaagtaagagcaatagcaatacaagagttgataaatatgactatcttgcaaagccactttataactatgcaacgctttcattaatacctccaggttcaacatttaagcctcttacagctatagctggtcttgagacaggggctataacgccggaaacaactatttatgatcctggtagctttgatgatggaatgggttttaaaactgaatttaaatctgatggttatcttggatacaaggatttaaaaggtgccatagaaaaatcaagtaatggatactttatgacagttggtaagcttttaagacaaaaaggtggcagtgatattcttgcaaagtatgcttggaaatttggacttggagttcagcctaattcaaatgttacacctactacaggaatagaaattcaagagaattttggacaagtatataattcatatactaataaaaataattttgctcaacaaggtcaatggagcataatggaaaaccttcaaggtggaaaatatttaaagggagtttccataaacctatatacaggtgacaatgattcaaaagagctttctacaataaaggcagctgtaaaggaaaatataaagaactctatttcaagtggaaaatttgatagagacaaaacagaagatttagttacaaagcttgtaagcactgatcctttatacaaaggaaaaacattttcaaaatcagatataagtacgcttgttagtggaatagtaactgaggaaacaaatgattatacacaggcaacacttccttataacatatacaatgcagctattggtcaaggtatagatgaatttacacctcttcaacttgcaaattatgttgcaactatagcaaatggtggaaaaagatataaagctcatcttgtagataaagtgacggatgcaagcggaaaggttgtatacgaaaataagcctgaagtagttgaggatacacaagttaagcagtctactatagatgcagtaaaagctggaatgagtgcggttaatgatagtggtactgctgcagatacctttaataactttccaataccagcagcaggaaagacaggtacagctgatccgtatacttcagaggttgaaagaagcataatgagatcttcctatgctgtttatgttggattcgcacctagagataatccagaaattgcagtagcaacagtggtatttgatggtggatttggaagtggtactgcacaaattgctaaggacatatatgaagcgtatttcaaaaatcagcttaaacagcttaactttaaatttgatacagatgtggatgcaaagacagaaaatgatgctaatactacaggaaatgtagctgagcaaacacaaaactaattgaaaagagtcttcatatagtaatttttagattactatatgagggctctttttattaaaaggcggaaattataacgaataactaaataaaactatatagttaaatattgacataatatttaattaaaagtataattttttatgatacttaaaaatgtttataaatgacatttaatttaaagaaaagtattagttcaggaatctcgcttaacgctccatatggtgtattaatttagtatttatttacgtacttcaatttataattttattttatatatgtggattttagctgagagagataataaaaataagattgtaaagagggtagtaaaggttatgaaaaaaagtgcaaaatttaaaaaaatatttaatagggtaaatgttttaaaagtggtagtattgatagtatttataggtatcacagttcaacttgtaaatcttcaaatattacaaaatgctaattataaagcaaaagccaataatacagctcacagattcataaaagaggttgcaccaagaggagagataacagattctgagggggcaatacttgcaactaataaacaaagctttgatgttacttatactcaaactgatgataataaggatgatttttacgatataattgcaaaagtgttttatattctggataagaatggagaaaaacaaaatgacagctttgcacttaaggctgattctaatgggtatagatttgattttaatactgataattgtgatgaaataaaaaaaatgcagattagattcttaaaggatagaggatttgaagaacctattataaaaaaactgtataaaggaaaatcaaaggaaagtgatttaacagattctgaagtagttagagtaaataatgaacttcttaaaatttcacctaaagaggtttttgaaactcttactaaaaaatatgaaatacctaaagcttataagatatccatagatggacaaaccataagtaagaactgtgatgtgaatgatattagaagatttatggtggtaaaggatgctgttctaatagtgaatggatattcaggatataaaccagttgctattgcaagtaatgtgaagcaagaaacctcttttaccattcttcaaaaatccaatgaacttccagggatagatatatcggttgatcctataagggattatccttatggaaaactggcatcaaatgttctagggtatataagcaaaataactccttcaagttctaagcagtctgagaattacactgaaaagggttatgatgtaaacagtgatttaataggggcttcaggaatagaagcagctcttgaagatagacttagaggtacatcaggaggaagaattgttgaggtgaataagcagggaaaaataacagatgagcttgcaaaaaaggatccatatccaggacaaaatgttaaacttactataaataaggatgtacaatatgcggcagagcagtctcttataaatactatggcaagcttaagagcaaaaggttattctgatagtaatagtggatcttcatatttgggaaatgctacaagaggagcagcagttgcaatagatgtaaaaacaggtggagttttagcacttgcctctgttcctaattttaaccctaatgatttttcggatcccaatgggctttcaaaagaagctactgaaaaatatttttcaacagatattatttctaaggcaaagcaagttggagtgccagaaagtttatatgatactttatttcctgtaagtaagagtgataaccgtacaagaattgataagtatgattatcttgcaaagccactttataattatgccacgctttcattaataccgccaggttcaacttttaaaccactaaccgctatagcaggtcttgagacaggagttataacaaaggatacaacaattgatgatgaaggcttttttgatgacggaaagggatatagaactccgtttaaggcagacggacctcaaggaaataataatttaataggagctatagcaaaatcaagtaatgcatattttatgacagttggaaaacgactaagagatgcctatggaagtgatattcttgcaaaatatgcttggaagtttggtcttggagtacctcctaattcaaatataactcgtacaacaggaatagaagtccaggaaaactttggtcaggtatataatacgtatactattaaaaatagttttgctgatgaagggcagtggtccatagctgaaaagcttcaagagggaaaatatcttaaaggttcttctgtaaacttgtatacagaggacagtgattcaaagaagctgtctactttaaaggcatcaataaaagaaaatataagaacagctatatctacaggaaaaaccgatagaaataaaacggaggagcttgtaacagatcttataagtacagaccctttatataagggaaagacattttcaaaatcagatgtatcagctcttgctagtggtatagtatatgatgaagcagatgaatacactcaagcaacggttccaggtaatatatataatgcttctattggtcaaggtataaatgagtttacacctcttcaacttgcaaattatgttgctaccatagcaaatggaggtaaaagatataaagttcatcttgtggataaggttacagattcaagtggaaaggttgtatatgaaaataaacctgaggtagttgaagatacaggtgttagtaaggcaaatatagaagcagtaaaagaaggaatgaatgcagttaatgataggggtacagcagcgggtaccttcagtgagtttccaataccagcagcaggaaagacaggtacagcggatccttatacttcagatgttgaaagaagtataatgagatcttcttatgctgtttatgttgggtttgcacctagggataatcctgagatagcaatagcaacagtagtatttgatggaggttttggtaatggaattactcaaattggaaagagcatgtacgaggcatattttaaagatgttctgaaacaaaagtataattttaactttgatacagatgttaatgcaaagcctgaaacagatgcgattactcaggcgagtaataatagtaattaaaatataaaaatataaagaagctatattagggtatagtaatacactctaatatagcttctttatattctatgtatctttatagatggaaatggatacaatatagtgaactttatatatgtactaagggagcaataataaggttgtttataattaaaagataataaaatgagattataaagaaggtagtagagtttatgaagaaaaaggttaaaattaaaaatatatttaatagacttaatgttttgagggtcacggtgcttatagttttttttggagtaacggcccaacttgtaaatcttcaagtatttaaaaattcagattataaagcaagagcaaatagcacagcacatagatttataaaagaggttgctccaaggggacagataactgattgtactggaactgttcttgcaatgaataaacaaagttttgatgttacatatattcaaactgatgataatagatgtgatttttacaatactgttgctaaggtattttatattttagacaaaaatgctgaaaaacaaagtgataattttgaacttaaggttgataatgagtataggtttgattttaataccacaaatccagatgagctaagaaaaatgaagcttagatttttaaaggatagggggttcgaagaagaaatcataaaaaggttatataagggaaaaaacaaagaggatgagcttaacaattctcaaaaggaagctgtaaataatgagcttattaagatatcaccaaaagaagcctttcaaacccttgttaaatattacaaaatacctaaatcatataaaataaccattgatggacaaaaagtaagtaaaaattgtgacttgaatgatattagaagatttatggtagtaaaggatgccgttaagatgaatagcttcttgggatataaaccaattgttatagcaaggaatgtaaaacaaagcacatcctttaaaatacttcaaaaggcaaatgatcttccaggaatagacatagcagtagatcctataagatactatccttatggtaaattagcatccaacgtcttaggctacataagtaagataactcctgcaaattctaaacaggcagaaaattatagagaaaagggttatgatgtgaatggagatttaatgggtacatcaggaatagaaggggcactagaaaataggcttaggggtacatccggtggaaggattgttaaagttaataagcagggaaaaataagagatgagcttgctagaaaagatccatatccaggacaaaatgttcagttaactataaataaggatgtacagtatgcagcagagcaggcactaataaatactatggcaagattaagacaacaaaagtatgctgttacacatgcaggttcaacatatttaggaaatgcaacaagaggagcagcagttgcaatagacgtaaaaacaggaggagttttggctttagcctcagttccaaattttaatcctaatgatttttcaggtccgagtggtctttcaaaagaggctgtagaaaaatacttttcaacagatattttatctaaggcaaaggaagctggggttccagaaagtctttatgatactttatttccagtaagtaagagtgacagaaattcaagaattgataaatatgattatcttgcaaagccactttataattatgcaacactttcattaataccgccaggctcaacttttaaaccacttactgcaatagcaggtcttgaaactggggttataacaccagatactacaatagaggaccctgggtactttatagatggaaattttaagcctgaatttaaagcagatggaccacagggtacgaacaacttaacaggggctatagcaaaatcaagtaatgtgtattttatgactgtgggaaaatatctgagacaaaaatacggaagtgatatactggcaaagtatgcgtggaagtttggacttggggttccgcctgattctaacgtaacgcctacaacgggaatagaaatccaagagaacttcggtcaagtatataacacttacagttcaaaaaatagttttggtcagcaaggacagtggattgtaatggaggatcttttaaaaggtagatacttaaagggaatacatataaatttatatactaatgatgatgattcaaaagaagtttctattttaaaatcagagataaaagaaaatataagaaagtctatagcactaggaaggtttaatagagatgatatagaaaatcttataacaaagcttgtagacacagataaattgtataaagaaaaggcaatttcaaaatcagatataaaaattattgcaaattgtatagtaaatgttgaagcagatgagtatagtcaggctacaacaccaactaatatttatagtgcggctattgggcagggattaaatgaatttacaccccttcagcttgcaaattatgttgctactatagctagtaatggtaagagacacaagatacatcttgtagataaaattatgaacgcagatggaaaggttgtatatgaaaatagaccagaagttattgaggatgcagcaattaaacagtctacaatagatgcagtaaaagaggggatgaatgcagttaatgatagaggtactgcaaaggatacctttaatgattttttaatacctgcggcaggaaagacaggtacagcggatccctacagtgaggaaactgaaaaagcaataaatagaacctcctatgctgtttatgttgggtttgcacctagacaaaatccgagaatagcagtagcaactgtggtgtttgatggtggatttggaagtggtattactaatattgcaaagaatatatatgaagcgtattttaaagatgaacttagaaaggataactttaattttgatatagatgtggatgcaaaaccagaggtagatactccaatcagtgatgctgctgaaaaatgatatatataatatgattttttatgatattcaatgtgcggaaaatgaataataaaagaaggattttacaaaataatgttgaattatattatattaaaggagccaaatactttagatttaagggttctactgtattttccctatattaggatgtgtggaggtttagtatgtttagggacggaataacgattaagggaaataaagaaggtttaaatgtaataataaatataaatagttttaaagattttgatgagatgttagatgcttttatcgcaaagttatctaaagggaaaagattttataagggatgtacacttagaatcactacacagcttaaagagataaatgagagaaatacaaggaagcttaaagatattctttttgatgaatttttaataaaggattgtatttttgaagatagtgatgagaataagagcaaggtgtttagcgggatttatgaaggtagaactaaatttttaagaagaaccgtaagaagtggccaaattattaagtactcaggaaatgttgtcattgtgggagatgttaatccaggttctgagatttatgctggaggaaatgtaattgtttttggtattttaagaggagatgttcatgctgggtctacaggaaatgataaagcaataattgcagctttgagacttcaacctaaaatactacaaattgccaatagaatttctagagcgccagaagatgatgataagcctgattatccagaggttgcaagacttaaaggtgatgctataatagtagagccgtattcccctaacaaatttaatatataactgcttgggggagtaccccttttttttataatcaaataagggtaagttcaactatgggttaaatttacttttattttagagatttataagtgatatttatggttaaaatagaatattagagtatatttaaaagggtttttttgatttatgtagaatagtttattgtgtagaagaaattcttgcgaatactataaaagtgggataaaatgggatggaaaagcatatagattaagttccgcaatcagttcactacaaagtttatatttgttataatggttactaaggtaataactaactatgtaattattaaaaatatttatatacatatattcgcctaataaatatatttaatggaggtaatattaatgggagaagctatagtaataacatctggaaagggcggagttggaaagactacaactactgcgaatattggtacagcacttgcagctatgaaaaaaaaggttgtgctagttgatggagatacaggactgagaaatttagatgtacttatgggtcttgaaaataggatagtatttacgcttcttgatgtggtagagggaaattgtagattaaaacaagcactaattaaggacaagcattatgaaaacttagcactgcttccaacagcacaaacaagagacaaaaatgatgttaagccagagcaaatgcttaaattagtgaatgagcttaaagaagaatttgattatgttattatagattgtccagcaggaattgagcagggatttgaaaatgcagtaattggagctgatagggctatagttgttgtgaatcctgaagttacatctgttagagatgcagacagagttataggaaaaatagatgcaaaaggaattgaagatcatcaggttattgtgaacagaattgattatgagatggttaaacgtggagacatgcttggaattgaggatgttatagataatcttgctataaagcttataggagttgttccaaacgataaacaaataacggtttctacaaataaaggagagcctatagttttaaatcaaaatgctaatgcaggaaaggcatttagagatatagctagaagagttttgggagaagaagtaccttttgaaaaatatgaaactcaaactggatttattgcagcaataaaaaaaatatttagtaagtaggaggtaggtaatatggatttgttcagttttttttctggaagaaattcctcgaaaccaggtagctaaggaaagattaaagttaatacttatacatgacagagcagacttatctcccgaacttttggatctcattaaaggagaaattttaaatgtaattacaaagtatgtggaaatagataactctgatgttgaggttaaacttacgagaactgatattgaggaaggaaactccccagcactaattgcgaatataccaattagatctatgaaaagtagaaaaccaataaaaaaatatcattataaagctgtgtatatatatgtaaataatgtttacagtaaattaattatttgcatatagaactctaatatgagtgcatggctttttcttttttttgtggtataatcataaaagtggagggaagagacatgatattaaataaactaaaaattgataaaagaacattaaagcagatagattttttaatatttctaatccccatagtaattgctatttttagctcactaaacatttacagtgcggttcatagaaatagtgcgcttgcaagtacatggaagcttcaattaatatggtgcttgatgggaataattgctatatacataataattaagatggactatgattttcttaagaattatgcagaaattatatacggtttagctgttgtgcttcttgtgattaatgatatttttggaagtacgagaaacggtgctacaggttggattgctataggacaaagagctattcagccttcggaatttgctaaaattgctctagtaattattcttgcaaaaaaagtagatgcaatgaaggatggaataaataacgttaaaaacttctttataatcttaatatatgctgcaataccaactgctcttgttttaattcaaccagatatgggaatggccatggtatatttcttcacagtactagggattgtttttgcggctggacttgatttgagagttatatttggaggaatattcggtattatagttgcggttgtaggtatttggaatacttcattgatgcagcagtattggaaagcaaggcttacgtcttttttaaatcctgaaaagtatagttcttcaacaggacttcagctcattcagtctaaaatagctataggttctggtggcatatttggaaaaggcttcttaaaggggacgcaaatccaaggaggatatattcctgaaaactataccgattttatattttctgtagtcggagaggaatggggacttattggagcaattgttttaatgcttctatatattatactcatatatagaattatcaagatgtccaagaattcaaaggatgcctttggaaaaatattctgtgttggaatggcatctacattcttattttccgtgtatcaaaacatgggaatgacaataggaatagcgcctatatctggacttactcttccatttatgagttatggaggaagttccatgtttacggcatttatagctattggaattatacttagcataggtgtaagaaaaaataaaattaacttttaaatttagaattgatttatgcatacttgaaaatgctggtttatttaaattagctgtatgcataaatcaattttttaatatactccataattagtaataaaagtagaaaagtgaaatatatatataaggaaattaatttaagaggttgtttctgagaaatgatttttaatcacttttaaagtaaaaaatttaattgtgacttttttatacttaaaaatctaagctcattttgaagcagccttttacttttattattaacgtatcaataggaggatagcatgggaaattacaattctcagtacgaaaattactataggaacttacagaatagaagcattagaacaagcagttactataagagtagtggttttaacagaaaaaaccttggtgaaaaaataataaagaagattgaatttcagctaataggtactttagtattgtttttagctgtattctctttaagagaagttataacacctgaaactaaagcagcctgtaattatataaaatatactgtttcatataattatgactattcgcagatactttcttatattgaagggtttaatttaaatgatgtggagacctatgcaagtaaaatagatatggattcacttaaaaatcagtctgtggattatattgaaaatttaaaagccagggtaacaggagaaaagacctttggtgccaaaataaagcaagaatattgtttgcccattaatggaaagattgcttcacattttaagcaaaaggataaggatgttttaggaaatcagtatttaaataatggtgtggatattaaagctaatagtgatttggatgtgaaggcaatatacgatggtacagtggaaaaagtaggggaagataaagactttggtaaatatgttatggtagataatggtgatggagttgaaagcaaatactctaatatggattcttttgaggttcaaagaggagatggagttacaaaaggagaagttttaggtaaggttaagaagaatgatgatgcttcaaaatcgtacttacattttgaaataatgtatatgggtgagaatcaagaccctgaaaattattttactttcaaataagactaagcaatgtttcggagtgattaattgtttaaattaagcaaatattttattccatatatgataattttattttttataggatttagaggtgaaatttttagtgtcgttattttagttattattcatgagtttacacattatttaactgccagaatgttcgggttcagtggttttgatatagaaatactgccttttggtgctgttttgagacttaaaaaaattgattacgcaactcaaaaggaggatattattatttctttatctggacccattttaaatttaattctggcggttattttttatgttatatttaaaaacagcggcaggcatatatattattcactatactttacaaatctgtcccttggcttatttaatttaatacctgcttatcctttagatggggggagaattatgaaagaggtgctttctgagaaaatcccttatagaaaggcaaatgaagtaagtatatatataagtatagttataggaataatattttgcattttttcaattgtaggacttttctttagtgtaaaaagcattaatatgctagtggtagctttttttatactattctgctcttttaaagaaaaaggaaggatggtctatattgttatgggtgatataataagaaaaaaaataatatttctaaggaaagggtatattgaaaatagaatgatttcagtatccgctgagaataaccttttaaatgctcttaaagttattgataaaaacaaatacacagtagttacggttttaaataaagagatgaaggttatagatttaatttatgaagaagaaatgctcgaggctttaaagaactatggaaatattacttttggaaaattggtagaattaagagaaagtaatgactgagataaattttaactgttgaacatttttttaagtatgtgttagaatataaaaatgagcgatttttaggaggaaaatagatgaataacattattgatgatgttttatttagggtagaaaagccagcaaggtatataggcggagaatttaactctgttattaaagataaggataaggtggatgtgagatttgccttttgtttcccagatgtatatgaagttggaatgtctcatttaggaatgaagatattgtataatgttttaaataagagagaagatacgtactgtgaaagagtatttgctccatggccagatatggaaaaattaatgagagaaaatgacatgcctctttatgcacttgaaacaaaggatcctataactaattttgattttatagcttttactcttcaatatgaaatgagctatactaatatacttaatatgcttgatcttgcaaaggttaaagtaagagcatctgaaagaggagaagatgatcctattattgtatgtggtggaccatgtgcatataatcctgagcctctttatgacattgccgatattttttctttaggtgagggtgaggagcatttaagtgagttagttgatttgtataagaagtgcaagaaagataaattaactagaaaagagtttttaagaatggcatcacatatagagggaacttatgtaccttctctttatgaggtgtcatacaatgaggataatactataaaggagtttaaacctttatatgatgatgttccaacgaaggttaaaaaaagaataataactaattttaacgatgttgtatacccagatgattttatagtaccttatagcgaaatagtacatgatagaatcatgcttgagaccttcagaggttgtacaaggggctgcagattctgtcaggctggaatgatatatagaccggttagagagaagaaaacagacagacttatggagcttgcagataaaataataaaaaatacaggttatgaggagatgtcgttgacatcacttagtatatgcgattattcagatattaaaaatcttgtatacagtttaattgagaagtataaggagaataatgtaagtgtatcacttccatcacttagaatagattccttttcggttgatcttataaaagagcttcaaaaagttagaaagtcaggtcttacttttgcaccagaggctggaagtcaaagaatgagagatgttataaataagggagtaactgagcaaaatttaattgattcagtaagcagtgcctttaagaatggttggactactataaagttatacttcatgataggacttccatatgaaactataaaggatgtaagaggcataggagagctaggtaaaaaagttgttgaggaatattataaggtaccaaaggaagaaagaaagaaaggtcttaaggttactcttagcacatcaatatttgtaccaaaaccttttacaccattccagtggtcacctatggataatatagaatctgtaagagaaaaaataagcgagttaagagatgaattaaatggaacacgtgtaataaattataactggcatgagacaccagtaagttatcttgaggcagtttttgcaagaggagatagaagagtctgcgatgttcttataaaagcatttgaaaaaggagaaaaatttgacggctggtctgaatacttcaacaatgatgtatggatggaggcctttaaagaatgcaatgttgatcctgatttttatgtttatagaaatagaagctacgatgaagttcttccatgggattttatagacataggagtttctaaaaagtttttaataagtgaaaacgaaaaggccaaggaagaggtagttacgccagattgtaggggaggctgcacaaactgcggtgttaatgtaaatttcaaagaagggaagtgctttgaaggtgcgctatttaataaagtacagtaagggctctaacataaaatttgtttcacatttagatataatgagggctattcaaagaacggtaaaaagagcaggaattcctgctgagtactcaaagggatttaatcctcatatgtcaatgtcaatagctcagccactttcggttggaatttactcagatggtgagtactttgacctcaatcttaaagaagaagtcagtgaagataaaataaaagagacttttaataaggcagcaactaatgatttaaaagctttagatgtaataaaaatagaaaaagaatactatgactctggtaaaaaagtagaaagttctatggcagtaattgaggctgctagatattttataaaaataaagtataaaagtacggaaagccttaaagaagaaattgaaaaaatcattaaggatgaaaattggtcaatactcaagaagactaagaagagtgaaaaaatagtcaatattaagggaatggtaaaaagattttcatacaaaataagtgagggaatattagaaatagatactcttgtagcatgtggaagtcgtgaaaatctttcaccagatcttttatgtgaatatataaaaaaacatactagtaatgtgcttgaaaattccttttcggatataaaaagaattgagatgtatgcacttaagaataagaaactagttgaactttatagatattttgtttagcatccatgaaaagtctagtaagaggtgtttttattgaaaaagatttttatagaaagatgtacagattttttaaaggtagctgtattggataatggtgaattcaaagaatgctttatagaggatgaaaaggaagaaatttactcaggagcaatatataaaggcgttgttaaaaatatagtaccagctattaaatgtgcatttgtagacataggcaatggtaaaaatggatatctttatatggacagtaagtttaataatgtgaatattaaaaaaggcgatgaaatgcttgttgaaatagtaaaagaaagcataggaagtaaaggaccaaaggtaagtaatgcaataactatacctggaagatattcggttataattactttaaatacagacataaatatttcaaaaaaaatatcggattctaaatacataaaaatgctaaaggaaaacgttaaaaagccagaagatgtaggggtaatgattagaactaatgcacaaaatgttagtttagaggatataaataatgaaatagagaacctatatgaaacctatgtaggtataagaaaaaaagctaaatattcaaataaagttggaattgtttataatgcaggcggcacaatagaaagaatcatgagagacaatgaagatgtagcagatttaactgttgtagttaatgacaaaaaagatttcgataatattcaaaattatatactaacaaagaaggatatgaaatgtaatttgaaacttcatgacagcaatataagtcttatggagtattatggttttgaaagagaaatagtaaagcttatagatagaaaagttatgttaaaatgcggtggatatcttataatagataacacagaagcaatgcatgtgattgatgtaaattctggaaagaacataaagaattccaatctagctagaacagcatttctaactaatatggaagcggcaaaagaggctgcacgacagattatacttagaaatttaagtggtataatagtaattgattttatagatataactgatgaggaagctaagagtaagatagtaaatgtactcaaacaaggatttttaaaggataaaaataagaccatagtatatccttttactgagttaaatatagtgcaaattgcaagaagaagaagaggaaaatctatctatgactatctcgaagaaaaatgtgatagttgcattggaagcgggcgtaaattgaactttgaatacatgaagaatcttatgagaaataaggttataagatttttagaggagcacgaaaaggcaaagagtatatacatcgagatggataagagatatgaaaataaaatatctttagatgttgaagggttcataaaagatataggtgcggataatttatctgtatacattgaatataaaagcaagccagatgttttcaagataaattttagagaactttccagtgatatggagaaaatgcagcaatataaaatttatggatgaaaaattctttacaaagtttaagtgatatggtacaatggcacatgtagaccgcacaaaacgggtttttattaaacacaatttattgtgtacccctattggcgaggccgtaaatgaggaggtgtttgttaatgtacgcagttatagctactggaggaaaacagtacaaagttcaagagggagatgcaatttacgttgagaaaattgcagctgaagttgattcaacaattgaacttaatgaggttcttgcagtttcaaaggaagatggtttagttttaggaaaacctgtagttgaaggagcaaaagttgtagcaaaagttgaagctcagggtaaaagtaagaaaatcatcgtatttaagtataagagaaagaaagactacagaagaaaaagaggacacagacaggcttatactaaacttgtaattgaaaagatacaagcttaattatgattgatgtagtttttaagaaaaaaaataatgtggttgtttcttatgttataacaggtcatgctgatcgtatggcaaaggattccgagaggcatcttgaaaattatgatgaggaaacagatatgctatatgacaatgcagtttgtagtgcagtatctcttttaggtcaagtatgtatactaggaattgaagaagttttacatattaaagtgaattattctgcaaaggaaggatacatagctttaaatcttgaaaatttagatttaaatgatcttgaaagagcacaggttcttatgaaaactacattgttaggatttgaaaatttagcggaaagctatgatgagtatataaaagttagcgttgaggaggtgtaatttatgctttcaattaatcttagtttgtgtgcgcacaaaaaaggaatgggtagttccaaaaacggaagagacagtgagtctaagagacttggagttaaagcttctgatggtgaatttgttttagctggaaacataattgttagacagaggggaacaaaaattcatccaggtgttaatgtaggtagaggtaaagatgatacactctttgctaaagctgatggattagttaaattcgagaaacgcggaaaagataagaaattcgcaagcgtttatccagttgaaattgaacaaagcgtagctgaatagtattaagcaccctttactaagggtgcttttttaaagtttaaattataaaaacaattaaatataggaataatatatatagtttttataaaaatttattatagaactttgtaaataaagttgaaggtaaaggtgagataaatgtttgtagataaggctaggatttttgttaaatcaggagatggcggcgatggagctgtgtcatttagacgtgaaaaatatattccgcttggaggtcctgacggaggagacggaggagaaggtggagatgtaatacttgttgtagatcctaacatgacaactctacttgactttaagtataaaagaaagtatgtgtcggagagaggacaaaatggtcaaggagctaaatgttatggaagagatggaaaagatctttacataaaagttccaatgggtactataattagagatgtagaaacagataaaataatggcagatttagcacataaagatgataaatttgtaattgtaaaaggtggaagaggaggaaagggaaatgtaaagttctgcactccaacaagacaggcgcctaactttgcacaaccgggcatgccaggagaagaaagatggataagtttagagttgaaattgcttgcagatgtaggattaattggtttccctaatgttggtaaatccacacttctttcagtggcatctaaggcaagacctaagatcgctaactatcactttacgactataactccaaatcttggcgttgttgatgttagtggaattagcagctttgtaatggcagatataccaggaataatagaaggtgcatcagaaggtgttgggcttggatttgaattcttaagacacattgaaagaacacgacttttagtgcatgtagtagatatatctggatcagaaggcagagatcccttagaagattttcttaaaataaatgaagagcttaaaaaatataatataaagttgtgggatagacctcagattgtagcagctaataaagctgatatggtatatgatgatgatcaatttaataagtttagagaagagcttaataagctaggatacaagaacgtatttaaaatatctgctgcaactagaatgggagttgaggatcttttaaaggaatgtgctagagttttaagtactatcccagttacagatatggaaataccagaagaggagaggtttgtaccagaagataaacactttacttacacaattagaaaagaaggcgatacttatattgttgagggaacttttgttgatagacttcttgcaagtgtaaatgtaaatgaaccagattcttttagatattttcacaaggttttaagaaataaaggtgtaatggcagagcttgaagaaatgggaataaaagatggagatatggtaagacttaatgattttgaatttgaattcttaaagtaggaggagatttatattgactgggaaacagagggcttatttaagaagtatggcaaatactatggaggttatattccaaataggtaagaatggcattgatgaggctattttaaagcaattagacgatgcacttgaggctagagaacttataaagataaacgtgcttgaaagcagcggaatgacaccaagagaagctagtgatgttttatgtgaaaaacttaattgcgagggaatacaggcaataggtaaaaaacttgttatatataggcaatcaaggaaaaagcctaaaataaaattaattaattagaagtgcaaaagagtgatataatgaaaaaaaaagctatttttggaggaacctttaatcctattcataatgcacatttaaatatagcagctaagagtatagagaaacttcagctggatgagttaatatttgtgccatcagggaatcctccacataaaagtgaaaagggaatagcaccggcagaattaagatatgaaatggtaaaagaggctattaaagataattgtaagtttaggatagatgattacgaaattaaaaaaaaaggaattagctatacctatgaaacacttgagcatttttctcgttctcaaaaagatgtagattggttttttattgccggattggatagtcttatggatttagacaaatggagaaatgtaaatactatattaagcttatgtaagtttatagtttttaataggagtggatacaataaaagtcaagttttagaacaaaaagagtatttggaaaaaaaatacataaataatatagtatttttagatattaagccaatagatatttcttctaccataataaggcaaaaaattagagaaaatgaatatataggagatttggttcctgagaaaatttacgatataattaaaaaaaataaactatatgtttgaaggtgtatattttaatatgtggtcatatgataaaattacagattacttaatgaataatttaggtgaaaagagatataaacatagcttaggtgttatggatactgcagttagacttgctggaatttataatgaggacacagaaaaggccagaatagcaggacttgtacatgattgtgcaaaaaaactacctggtgagaagattattgaaatatgtaccaacgaaggctatgaattaggagatgaggatataagaaattcttatcttctccatggtcttgctggaagaattttagctaaaaaagttataggaattgatgatgaagatgtacttaatgctatagagtttcacactacaggaagacccaatatgtctctcttggagaaaataatatatatagcggattatattgaaccaggtagagaatttaaaggtgttgatgagcttagaaaagcagcagatgaagacttgaataaagctcttttaatgtcttttgataatacaattaagtttgtaattgataagggtggttttttacatcataatactatagaagcaagaaattatttgatttctagaaaggggtaggtaggctaatgtattttaataagaagagggtaataatagtttgctgttttgttttattatgcatagcaatcggtcttggaagctttttttatgtatccttattttctactagtactaattctaaaaatataaatgtagctgctgtaactcctaaaaataatgaagcagttaatatactgattacaggagtagacacaggacgtaaggaaagtgaatttggagattactcaaaaagaaatgatgctataatggttctgcattatgattcgaaaaataaaagcgctaaccttgtgtcaataccaagagatacaaaggtaactattgatggtaacacaaaaaaaataaatgaattgagttctataaacggtcctaagtatttggtaagtgctataaaaagtaattttggaataaatataaactactatttacagcttgattataaaggctttagaaacatggttgattcaattggtggtgtaaatgtaactataaataataaaatgaactatgatgatcctaatggtaacattcatatacatctcaataaaggagaaaatcaaaagcttgatggaaaaactgctgaagaatttgtaagatgggaaaaaaataataattcagaagaaaacattgatagtgatttagctagaataagaaatcaacatgagtttgtagcagctgtagttcaaaacatgaaaagaaaaagcatgatatttaaaatgccatctttattaaaagtggttgcaaaaaatgtacagactaatatgactgcgtctgatatatacaagtatggaaaggctttggcctctgtaaaaagtgaaaatttaaagattacatctataaatggaacaaatgtatacattggtggaaatacgtattttgtgtataatcataaagaaaataaaaatatattaactacagggaacaaggtaaaagtaagtaagccaagtttaaattataagattgaaattttgaatggtacagataaaaatggacttgcaaaacagtataaggatatacttgtagcaaaaggattccaaaatgactttactacaggaaattatcctaaaaagcctgttaagaatactaaagtaactttgtacggaatagatgaagaggatgtaccttatataaagagtaaattaagccttagtaatgtagaacttataagcaaaaaaacagagaaatttgatataataatactgcagggtgaagattttaaatagtaaaggaagaatacgatgagaaaagaaataataaaaacagataaagcgccaggagcaataggtccttattctcaagcagttaaagttggaaatttgttgtttacatcagggcaagtgcctatagatccaaagacgggtgagcttgtttcaaaggacataaaggaagcaacagatagggttttcaaaaatataggagcaatattagaagaggcaggtacatcttttgaaaacgtagttaaaactgtagtttttgttaaggatatgaatgatttctctagtgttaatgaaatttatgccaaatatttcagcaagaatgagccagcaagatcttgcgttcaagcaaagcttcctaaggatgctcttgtagaaatagaagttgttgcagtagtggaaggttaagttatgatggataataagcttgtatatttagtagaaaaaaaatatgaaaattttaagataagggactacttaaagcaggttcatggattttctacaagactgataagaggggcagcttttggtgaaagattgtttgtaaatggaaaaaccgtaagactatcatacagagtactagaaggcgataaaattgaagtagacgtcaataaacctgaaagtcaaaatgttgatcctgaaaaaatggatttaaatatagtttatgaagactctgatataatagtgcttaataaaccagctaatatgattgtacaccctacgaaaaattatcagcatggaactctttctaatggattgctatattattttagggaaaagggagaaaattgcattgtaaggttagttaataggttggatatggatacttcaggtttagtgctagtggctaaaaaccaattttcacatatggccttagctagagatatgaaattagatacctttaagaaggaatatatagcagtagtaagaggaaatttatcatcccttaagggaactatagataaacctatctataaggaagaggaagagcccataagaaggactatagatgatagagggcaagaaagtataacgcattttgaagtagtagaaagatataaaaatgctgataaggtaaaattagttcttgagacaggaagaactcatcaaataagagttcatttaagcagcataggaaatcctataataggggatagtctttatggtgaagaaagcgaactaattaaaaggcaggcacttcatgcttttaaacttcagtttccacatcctagggatggaagaatagtgaatatagaagttaaactgccagaagatattgaaaatcttataagtaaagtaaaaggtgagtaaagaagcaattcttataactcaccttttatttatgtagaaaattagaaatatgaacttttatctttgttttgtcttacttttattcttaaaaactgtaaagctaatattaataatattgcagctagaatacatccgataatcgctttgttatcttcaaagtaacctgaaattgagtttgcattagaaagtttattagatttaacagttacagcgctgttcagctttaaagttccaatttgtttaccatctatagaaattttagctgccataatttgtgttccctttgaaaaatactttttctttagagaatttttgtcaacctgaacctttggaacactttttgaaccattttctgtacaatagtaataatcttcagaggctaaaagagggattttagttccgtctaaataatagttttcaactatatcaccctttgaaaatagctttttctgttgaaaattattaaaaccatactcaaataacgcttttgaatcatcataaaaagttttctctttactgtgtacaagtgcaacaacaagctttcttccattgttattagcaacagaaacaaaggaatgaagtgataaaatagtataaccagcttttccaccaatacatttatcataatagttttttgaatttttgtagactaacttatcctcgttccaaaagtttctggatttctttgtcttttctgcatccatattgttagttggagacatttgatagttaagtgttgttgaaattttttgatattcaggatatttagaaagttccttcattattaaagcaagatccttagctgaagtcttatgatccttatcgtataaaccatttggatttttgaaattggtgttagtacatcctagttcagcagcctttttattcatcaaagtagcaaatgcctgaggtgaaccacttatgtgctcagcaagtgctacagcagcatcatttgctgaaattaataaaagggcatgtaaaagatcacgaacagtaagctcttctccatttgttattcctatagaatttccatccctaagagcaaggtactttgttgtaaagtcgttgctcaccttaaccttatcatctaatttgcacttttctagagttaaaagtgctgtcattattttagtagttgatgctgggggataagaagcattcatatttttttcgtataaaatttgtccactattaccatccattagaactgcgccatcagcggagacatttggtggatctggtactttggcatatatattaatatttatcgttgaaaataaaaacattacagtcagtgtgaatattattagttttctcatgtcaccctcctaaaaaattgataataacagtataccaaaaaaaaatgaaggtggcaaaaaataatgtttaaaaaaaactgttatgtcaaaaataccaattaaaggttcaaaaagtagaaagttaaaaaatatatatgtaaatggttaatttttaaaatatttgtttatttatatatgagaattaagctgtaatataaaatagatttggtggtgtgaatagtgaaaaataagaaagctgttgtgggatctataactataatttttatatttgtagtgttgatttttattggatatgaagtggaaagtaggggggaggataattctagtaatgtttctgtttctgaagtcatgaataataagaaaagcaagaaatctaatgaaaatgaaacaaaagaagttagtgcgcaaatttttggtgcggtgaaaaatccaggcgtgtattctctaaaatccaatagtagagttaaagatttgattgatcaagcaggaggatttttagataatgcagacaagtttagtataaatggtgctgcaaaattagttgatggtgcaaatatatatgttaaagctcaaggagaaaaagatagtaaagtaacaaatacttcatcatcacaagaaaatactcaaccacagcaaaattcttcaggagaagataaattggatataaatacagctacagtagatgatattgtaagcaaaaaaataaaaggtatagggaaggggttagctcagaggatagtggattatagagaaaaaaatggtggtagaataagttcggtagaagatttacaaaaagctataggtaaaaaaagaggacaggatttaatggattatgtaaatataaattaaagaaaaatcaaattaaaacgataaaaaatgatataaatataataattgtaaagtttttaatatggggttaatataatactatattagaaatttaagcggacaaaagttttatttctactgtggtggggtgatgaaaatggcagattggtatggtttagcagctgtagacgttgttaacctctttaggagtaattatacaacgggactaagtgatgaggaagttttacaaaacagaaaattatatgggagcaataaaatagtcagtacaaaaaataaaaatttaatgttaagcatgatcaaagaaatagttaatccatggtttatttttttgattttttgttcatgtgcatttttttatataggaaagtttaattatttttttgtagtgctacttttagatatatttgctctaataataagtatacttccttattatagaagctataaaacaatcaagaatattgaaaaaattaatctaagcaaagtaagcgttctcagaaatggaaagcttatgaatattaactctgaggacttagttgttggtgatatagttatcttttctaaaggaaatactattccaggtgatataagaataatagaatgcagtggactaaaggtaagtgaggtaagtgtaacaggagacgaaagcataatggaaaagttttcagctaaaatatacttggagactttagaagtatcagagatgggaaatatgctttttaagtcgtctgtagtgtatgctggagaaggtcaaggtatagtggtagctgttggagataatactgaattcggtaaaatagtagccccaatattgaattatgataaaaatagaaacttcttaataaggaaagtaagagttgggatgaactacttagctattttttcttttatttcttggtttggacttacgttttttatgaattcaaacggaaaggcattaaatgaatctttgcggcaaacatcatttttaattatcgcaggtataccaataaatatattatttttattatatgctatgtatgtagttataagagcatactttaaatcaaagaatattgacttgaagttcttatcaataattgaaaacttatctaaaataaatgttattgtaacagaaaaagaagaggctttaacaaaaagtaatatgtttgttagaaagttttatgataatgaatctataaaaaattttgattctaaattttttgtaaatgcaaatattaaaagaatacttgaaatcggttttttatgtaatgattttgcttcaaagagaaatttaaacaaaactctaaatgcggcagaaaaggctatagtggagtttgttgaaggtggagatgtagatttagagatagctaaaagagtttttgaaatcccatacaatggtaataagaggattaaaactacagtaaataaaatgagaaaaaggtacagagctaatgttaagggaccagtggattccatacttaaaaactgtactcatttcatggtggatggtgttgaaagagaacttactcaagaagcaattaatagtataaaaatggcagacatacaaatgagtaatgagagcttatatgtaatggcttttgcctataggaactttagttataaacctagttcggacgaaaatatagaaagcaatctggtatttgtagggttaatcgggtttgaaagtatttttaaagaagatgtagaaaatgcagtggaaaaatgctttgtgaattctgtaaaaccgattatattcacagaagatggaaaacttacagctatatctatgggcagaaagataaaagttgttaaagacgctacagaagttttatcaggtgtagaaatggataatatgtctgaggaagaaataaagaataacattgagaaaattagtgtttattcaagagtttcggaagaaaataagcgggatgtcataaaaaatttcaaggagttaggctacaatgttttaagctcaggatcaaaattaacagaactgcctgcacttaatgaagctgatttatttatatcctatggtgaaaactccaataagatagtgaaaagattaagtgatatagattttgaaaaaaatgatatgggcatgattgcaaatatgattataaatagtagaaaattgattatagcacttaaaaatttaattaattatgtttttatttggagctttaatcttgtagcagtaatcttattgctttatatgaataacttaaatttaaagtttaatatagaacagatattatggattctattttttaatgttttgataaatggtattgcaattttttctaactataaaaaagttataacacaatacgatttcaatttagaagaagaaatatggcatataagtgcagcttccataatttttaatggaataattcctgcagtgataattttagcaagcagtgcattttttagtaatttaaatattcaggtgtttgtattttgggctattatatttgaacaaataatttatggattgtttgataagttcgagaaaaatatttatttttttgttgtgataattttgaatttagttttagaggcaggtatagcgttgagtagtttaggcacttatattttcggaattgatagattgagtttatatgatatgaaaattataggtttagttgcagtagtacagatggcagcaatatttttgaaaaaaatgtttacggaatagaaatatactgattattgttatttcaatttggttaaaataccaatggaggtgcattggtatgtttgatagtgtatatgaaacttttatttctaaagatgataatcgtgtatgtttagatattcctaagaatgattttttgtttagctatgaagatataacaaaagatacagcaaaggattttgtaaataactattttagagaaaaaggaagagaaggaatacctaatgttacagatgtgtccattgagagtgatgtaataaggctatatattaagattgattacagcgaaagtcaaaagcctatgaatgttccagactcactcaatatgcgtggatatgatcacaatagaacaagatgaagagacctcttgttttctattttgtatctattatactaggaattttaaccgctgctcttctgaaaattgatatattgataggtgcagttatagctgcatcttttttttgtagtatgttttttacattaaaaaaatcttttgtgattatcaacctagcattcttcctaatgggttttctttgccttatatactatttcggtattaatataaataataataagagtataaatttaaggatatcggataaaagtggacttctttatataggaaactataagggtagaaaagtcactatcaatgagaaaaacgctaagtttaaatttggcgagatagttaaagtaaagggtacgtataagagagatgttgattatggtaatggtattgttggaattattgatgtagaaaaagattatggatgtagatcagatattataaccaagatgtacagtattagaaatgaaatatatgaaaactatgcttcaaatatcggtaaggatagagcaggagtaataatgtctctgtgttttggagacacttcaaatttaagtaagaaagataaaaatgatttaaaaaagcttggaataatacatgctgttagtgtatcaggaatgcatatggcagtaatttatgaaattctagagaaaacattaggattagcttcggctataattgtatcattgttttatgttatttttacaggatgtcttccagctactatgagagcattcattatgatttttgtgttaaagctttcaataaaagtatataaaaactatgatggcctttcctctcttgctttatcaggaatcttaatgcttatttttaagccttattacatctttaatatttgagcagttttatcttatcttgcaacaatgggaataatgttgtactataagaaaatatctcgaatgttttataaattaccgcaaaaattaaatgaaagtttaagtttgaccttaagtgctcaaattttttctgttccttatgctggttttgtattaaaaaactttagtggaggttttatattaggaaatttaataatagtaccaatatactcagttcttataatactaggtaatctgggtggtattttttataatgtaaaaccaatatttcagcatatatgtgatttagtgtatatacttttaataagctgtgatgggctcatcaaattagctttaaaaataacaccgcaaataatttatatgtctgagattactagtgtttctcttgcctttatattttttagctttatcctcattaaaaagggatataagaaatttaaatatttgccaataatattttcaataggtataataatcaattcttataatgcaattccttgtatagagtgtattaatatcaataataaaaaagcgtttgttgttaaatatagagagtactctgcacttattacaaattataagataaaggattcaagccaaaaggaaagtatattaaatagtttaggagtaaaaaagctagtaaatataaaggataaatacactttaagaataaaaaaccagtatactatatattttgatgatagtgtgaaaatatatgacaagggtagtaaaattgcagatataaggggtgataatatatattatagtaaattttatactcaccagtatggtataataaaattagatgattcagataaatattcttttcttggtgtaagggcaacagcggaacttatagatgggaaagttttagttttaaaagggtgtgaaaaatgattaactatactgaacttgaagaaaatattaagaaaaacaatatagaaaatgtatacataatgtgcggttttaatgaaaaacttatgaaggaaagtataaataaaatactaaaaaaatcaataagccaggattttgaaagtctaaattacagtgtgtttgatggaaatgaagttgagtttgaggatattttaaatgcttgcgaaactgttccgtttatgagcgaaaaaaggatggtagttgtatatagagctggtttcttaaacgataattcaagtggttctaataaaaattcggataagttaataaaggacatagaaaagtatgtacctaacgtacctaagcactgcatattggttatgtattatgtatttgataatactagagaaaagccttcttacagggttaagaaatttgataaaaaggtatgtgtggtagaattttcaaaacttagaggaatgcagtttcagaaaaaggttaaagacgtatttgctgagaaaggaaaacaaataggaaaaactgagctcaattatttttgcagcagggtagaaaataacatggatatagtttataacgagattgaaaagttatgctgctacactcttgaaaaagagataacaaaagaaagtatagataaccttcttcaacctaatgaaacagacgatattttcaatttagtagattacatttctcaatcaaaaccagagatggctataactgttttaaatgaaataatgtacaagggtgtaaaagcaaatagtatattatatatggtagaaagacaatttaaactaatgctaagtataaaaataggtattgaaaataagcaaagtaaggaagcgcttgttaaggagttaaaattaaatccatacgtatgcgataagatgataaatgagtgtaagagatttactatgaaaaaaatacttaaatctttagatatatgtctcagaactgaaaaagagcttaaaagtgtttcgggagatcctaaatttaagatggaagttttgattataaatttggcaataatataaatttgaagaaagtttagaaataaaaaaaagccggtataaccggttttttttatgcatttaaagaatttaattttaaagctaatcttgatttttttctagcagctttatttttgtgaattataccttttgaagcagccatatctaaagctttagatacagtagcaaatgcagtttttgattcttcaacattctttgcttcaaaagcagcctcaaatttctttatgtaagtttttaaagctgatttaatcattttatttctaagagttttagtttcgattacctttattctcttttttgctgatttaatatttgccatttttttcaccaccttgcaattttgtatatgctagcagttttggggaaatctgcattaagccacactaaacattaacaaatgatattataacattaaagtacataatcttcaagtggaatttgttttaaaaatggaatagttatatataaatgaggtaaaaataatgaaaaaggaggagagaatatgaatagtgttagaactgaccttgcagtagaggcaagagagatgtactgtgagaaaaccgaaaatggtgataatggagtaagagtagatacaaaaagaatagaagatatagagattactacagtcgatgttttaaatgataaaggcgaagaaagaataaggaagcaaaaaggtacatatataacactagatataccaaaggttaccttgtatgattctgaagatatagaagagataagtaaggtgtttgctgatgaactttcgaagataataagtaaagcaaagcttgatagcagtatgactgttttagtagtgggacttggtaattggaacataacaccagattctttaggaccaaaggttataggaaaacttatggtgacaagacatttaaaaaaatatataccagatagtattgatgagggaatacgtccggtttgcgctgtagcacctggagttcttggaattactggtatggagacaggggaaataatacgaggaatagttcaaaatataaaacccgatcttattgtatgcatagatgcactagccgcgagaaagatgggaagagtaaattctactattcaaattggcaacactggaatatctcctggatcaggtgtaggaaatatgaggatggaattaagccaaaagactcttggagttccagttatagcagttggtgttcctactgtagttgatgctgcaactatggcaaatgatactattgatatagttattgaaaaaatgaaaggcgaagttagtgaagatagtaaattttatagtttgttaaaggcaatagatacagaagaaaagtctcaacttatatatgaagtacttaatccatatgttggggatttacttgttacacctaaagaagtggatatgattatggagacgctttcaaaaattatagcatcaggtataaatattgcacttcaaccagcacttgaattaagtgaaataaacaaatatgttaattaatttctaagtaataaacatccattcctcttaatatatttattaacggaggggatataatggttgttaaagtgataaacaaaaaacaagataaattttattttaaattaggaatgtttattttaatatttttaattttaggtgtaagtttattaaatattattggaataaatgtagataaaacatatgagaatggaaatggtatgtatgctcatatagtagattatagtttaccttgggttaaagtagctaataataagaatacaagtgaaaatacatattccataaaaaacattattttatcagcagcaggacttgatataaataagcctgaaaatgtaatatctaaagaagtatcatttttaggtgaggcattgcctaagtctataaaaagtgaatgccctaatgaaagctttactttagatgataaagatgtggttaagagtacaagtggttctgttcaaaatgaacccttaaaaaatataaatgaaaatatttatgatcctaaattaaaaaaggcacttgataaatcaaagcctgaaattttaatatatcattcacatacaacagaagcatataagccatatccagcagattctttgaattcaactcaaaatgtatgtgcggtgggcgatgaacttgttaaggaactgggagagaaatatggtatatatgctataaatgataaaacagttcataatgtggttgattataataaaagttatacgcgttcaggtgaaacacttgataagtatttaaagcagtatggcgattttaaaatgataatagatatgcatagagattctgatgtgcctaaaagtaaagttactgctagaataaatggtgaagatgtagctaaatttatgtttgtcatgacaagaaaaaatccgcattttgataagaatatggctcttgttaatggacttgtatcaatatgcaataaggattttcctggtatatttaatgggatatattattatgattatggaataaattattacaatcaacaaaaaagtaataatgcatttttgttagaggtaggctcagatataaacacaattgatgaggctaagggaacttctaaatatttagcaagaattattgcagaatacttaaatggcaaaaaatgaataaaatactgtaaaaaagtacatccttaaaaaggaggtgcttttttatatatgataaaaagatataaaattatattttgtatgatggttttttttggtgttattatatttattatattaaacaatattgaacttaatagaagtatatattgtaatgatgttcacataaaggtaagtgaagagagatctagaaatgaaagcaatgattacaatctagatgatatggaaaaacatttagataatcttgaaaataaaagtaaaagtaaaaattctagcaaggacaatttcgatatgttatctagagtttatgtacctaaatttagaatactctatagtgaaaacccatttgatataagatttgaaaccttgcattataaaatctatataaataaaagtatagaggattatgctgaacgtgagaaaagtattttgttctgtaagctggatgaatattataaagatataaataactatatggatgatattacagcatatataggaatatttaaaataaagttactaggctttattcatagggtttactagtgaaacaaagctaaaatcctataaaagggtttttgttgacaaaaacccttttatttatgctataatttaaattgattcgtacatttggagggataacaaaatgcaaagtgaaagacaaaaacatataagaaacttttgcatagttgcgcacatagatcatggtaaatcaacgcttgctgatagattgcttgaacatacaggaaccttaacacacagagagatggaagagcaagttcttgataatatggagattgagagagaaagaggaataacaataaaatctcaagcggcaagattaatatataagaggccagaagacgggcaggagtatatactaaatcttatagataccccaggtcatgtagattttaactatgaggtttcaagaagtttagcagcctgtgagggtgctgtattagttgtagatgcaacgcaaggaatacaggcacaaactcttgcgaattgctatatggcagtagatcatggacttgaggtggttccagtaatcaataaaatagatcttccaagtgctagaccggatgagataaaaaatgagattgaagatgtaataggaatagaatccagtgatgctcctcttatatctgctaaaactggtcttaatattgaagatgtacttgaagctgtagtacaaaaagttccagcacctagtggagatgaaaaaggtccactgaaggctcttatttttgattcatactatgatagctataaaggtgttgtatgccatataagaattaaagatggaacggtaaaggcaggtacgagaataaagcttatggcagctaataaggaatatgaggttattgaggttggtgtatttgtacccaactacttaaaggtagaagaacttaaggctggagatgttggatatataactgcatctattaaaaatgtaagagatgctagagttggagatacaataacggaagtaaataatccagcaaaggagcctcttcttggatatagaccggctatatctatggtttatagtggtatttatcctatagatagttcaaagtatgaggagcttaaggaagcacttgagaaacttcaagtaaatgatgctgcacttaattttgaacctgaaacgtcaatagcgcttggatttggttttagatgtggatttctaggactacttcacatggagataatgcaggagagaatagaaaaggaattcaatttagatgtaataatgacagcaccatctgttatatataaagttaaaaagacagatggaactctaattgaaataactaatcctacaaatcttccagaacctacagaaatagattatatggaagaacccgttgtaaaagcacagataataacgccatctgattttgttggagctgtaatggagctttgtcaaaataaaaggggaacctttatagatatggaatatatagaaacaacaagagtaatgcttaattatagggtgcctcttaatgaaattatatatgatttttttgattcgcttaaatctagaactaagggatatgcttcttttgattatgaattagatggttatatgagaacagagcttgtaaaattggatataatcttaaattcagaggttgtggatgcgttatctatgattgtacctaaggatagagcttatgcaaaaggaagaactatggcagaaaaattaaaagaaataatcccaagacagctatttgaaataccaatacaagcagcagttggaagtaaaataatagctagagaaacagttaaagcattaagaaaagatgtacttgcaaaatgctatggaggagatatttcaagaaagagaaaacttcttgagaaacaaaaggaaggtaagaagagaatgagacaggtaggaagtgttgaagttccgcaagaagcctttatgtcaatactcaagaatgattagatttggtattaggttaaatttaatttttacaaaaccaaagtgaaatcagctgaattaaaaatactatatgttcataatcatgttaagattgtggtgcatatagtatttaagttttacaaaaaatttacttatctttttaattgaattgagatgattttatgaacaaattaggtctttatatacatatcccattttgtaagagcaaatgcctttattgtgattttccatcctatgcatgtatagaagattacatgataccatatgcaaaagcattatgtacagaaattgaaaaggctagcataaataaagtttttagcagtatttttattggaggaggtactcctagttttctatcaatagaagctttaaatatattatgtgatgccttaaagaaggttagaaaaactaaagatgttgagtttacagtagaaggtaatcctaattcatttacagaaaaaaagctcatggtatttaaggatatgggagtaaatagattaagtataggtcttcaagcgtgtcaagatagacttttaaaaaagcttggtagaatacatacgttaaaggagtttacagttgcttttaaaagagctagaaatttaggttttaataatataaatgtggatttaatgtttggaattccagatcagactttagaagattttaaggagtcattggagtttataacaaaattaaagcctgaacatatttcttcatatagtctaatagttgaggaaggaacaccttattttaaaatgaatgagggtggtaagttaaagcttccaaatgaggatgaagaaagagatatgtattcttttgcgcgtacttttcttgaagaaaaaggatataatcaatatgaaatttctaactttgcggttaaagataaagagtgtagacacaatcttatttactgggagcttgataactatataggttgtggggcatcagcgcattcgtattttaatggagtaaggtatagaaatataaataatgtgaaaaaatatatagaacaaatttcaaagggtaatagcgtagtagaagagaatcataggaatttacttaaagaagatatggaagaattcatgtttttaggacttagaaaaactcggggagtatcaattgaggaatttaagttgaaatttaataaggatatacaagaggtttatggagatgttataaaaaaatatgaaacaattggtatgataattttgaatgaacaccgagtattcttgactgagagaggcatgcagatatctaattctataatgtgtgattttctattatagcgatatatggaataatgacgaaaaattcttagaaaattagtataaaacatggctaaatagcatctgaggagaaatagactaattttatgaaaataagaaaagttgacaaagataatgtcaggtgatattttataaacatagtcattagcactcaaagagagtgagtgctaataaagaggtgataatatggaaatggaggaaagaaaacttaagattcttcaggctataataaacgattatataaataatggtgagcctgttggttcaaggaccattgcgaagaagtataatctaggaataagttctgctactataaggaatgaaatggcagacttagaggaaatgggttatattgaacaactccatacctcttctggaagaaaaccttctgataaaggatatagattatatgttgatagacttatggaaataccaagtatgtcagttgaagaagagatgcttataaaagcaaagataatagatagtgcactttatgagatagataaacttgtaaaacaggcaatgtctttagtgtctgagatgactaagcttacatgtgtagtaaaatcattgtcagctagaaaaagttatattaaatcaataagtttaattaatatagagccaaatatgattctatgtgtatttattacagatagtggtatgattaaaaacagtatcattagagtaaagagtaacatagagaatagttcacttgagagaatagctaatatattaaactctaaactcaagggacttaccatagaacaaataaatcttgaggtaataaataatattaaaaaggatctacgtgagtatggccatatatttgattgcataatgccaaatctttatgatattttaagagaagctgattctactgaagtttataaagaaggtactatgaatatttttaactatcctgaatttaaggatattgaaaaagccaaggaatttttgtctgtaattgatgatagaaggatactagatactttatttaatgcttctggtggagttaccgtgaatattggtaatgaaaatagtataaaagaagctagagattttagcgttgtatcttcagtatataaatacaatgggagaccattgggaactataggaattataggaccgacaaggataccttattcaaaagtaatcaaggtcattatggaagtagtagaccagattaataataatttagataaaatgaataatagctagtagagtaagaggtgagcttatgcaagaaaaagatagtaaagatgttacaatggaagatgaagaaactatagcttcccaagaggaaatcgaggttgaaggaaatagtgaagaatcttctaaagaagaggaatccaataattctgagatttcagatgaaaatcttagtgaagaaaatttaaaattaaaggatgaaaatgaaaaattgaaaaatgaattggatgctgctaaagatagacttttgagattaagtgcagagtatgaaaattatagaaatagaactgcaaaggaaaaggaaggcatttatacagatgcttgtagcgatgtaataaatgaaatgcttcctacacttgataatcttgaaagagcagcttcaacagaaggtagtgcagaagatataaaaaaaggtgtagaaatggttgtaaaacagtttaagaattctctttcaaaattaggtattgaagaaatacctagtgaaggaaaatttgatcctaatcttcacaatgcggttatgcatatagaagatgaaggttatggagaaaatgaagttgtggaagtcctacaaaaaggatataaaagaggagataaagtattaagacatagtatggttaaagttgccaactaaatatataggaggtttttataatgtcaaaagtaattggaattgatttaggaacaacaaattcatgtgtagctgttatggaaggtggagatccagcagttatagcaaattcagaaggtgcaagaacaactccttcagttgtatcttttcagaagaatggagaaagattagttggacaggttgcaaaaagacagtcaatcacaaatccagataaaactataatatcaataaaaagaaaaatgggaactgctgaaaaagtagccatagatgataaaaattatacaccacaagaaatttcagctatgattcttcaaaaattgaaggcagatgcagaagcttatcttggagaaactgttacacaagcggttataacagtaccagcttactttaatgatagccaaagacaggcaacaaaggatgcaggaaaaattgcgggacttgaggttcttagaataataaacgaacctacagcagcatcacttgcttatggtcttgataaaatggatactaatcaaaaaattcttgtttatgatttaggtggtggtacttttgatgtatcagtactagaacttggtgatggtgtttttgaagttaagtcaacaaacggaaacactcacttaggtggagacgattttgatgagaaaataatggattacattgcagaagaatttaaaaaagataatggaattgatttaagaaatgataagatggcacttcaaagattaaaagaagctgctgaaaaagcaaaaattgaattatcatcttcaactcagactaatataaatcttccatttataacagctgatgcaacaggtccaaagcatatagatatgaatcttacaagagcaaaatttaatgaattgacagaaggcttagttcaagatactatagagccaatgaaaaaagcacttagtgatgcaggactttcaataaatgatatagataaaatagttttagtaggtggttcaacaagaattcctgcagttcaagaagcagttaaaaactatacaggaaaagatccatcaaagggtgttaaccctgatgaatgtgttgctattggtgcagctattcaagcaggagttttaacaggagatgtaaaagacgtattacttcttgatgttagtccattaacacttggaattgagactttaggcggagttgctactcctctaatagaaagaaatactacaataccaactaggaagagtcaagtattctcaactgcagcagataatcaaccatcagttgaaataaatatagttcaaggtgaaagaaaaatggctgctgataataagagccttggaagatttactcttgatggtatagcaccagcaccaagaggagttccacaaatcgaagttacatttgatatagatgctaatggtatagtaaatgtatcagctaaagataagggaacaggaaaagaatctcatattacaataacagcttcaacaaacttaagtgatgaagaaatagataaggctgttaaagatgcagaaaagtttgcagaagaagataagaagaaaaaagaaaatattgaagttaaaaacaatgctgatcagatagtattccaaacagataaagctttaaaggatcttggagacaaagtatcagctgaagataagtcaaatatcgaagctaaaaaagaagcgctaagcaaggtaaaagatggagacgatatcgaagcgattaaaaaagcaacagaagatttaactcaagcgttatatgctataacaactaaaatgtatgagcaaagcggagctcaaggtgcaccaggagcagatccaaatgcaggagcttcacagaaaacaaatggcggcgctgatgataatgtagtagatgctgactttaaagtagataatgataaatagtatttgaaaatatataaattatgattataatatatatagtacaaaattaagggaaagggtgttaacccttcccttaattttaagctttaataaagtttatgtggaatatttaggtggtgaaagggatggcaaacaaagattattatgaagtgcttggattagaaaagggtgcgagtgatgatgagataaagaaagcttttagaaagctcgctataaaatatcatcctgataaaaaccgcggaaataaagaggcagaagaaaaatttaaagaaataaatgaagcttatcaggtattatctgatcctgataaaaaggctaattatgatagatttggaactgcagactttaatggtggtggaggttttggagacttctctggaggtttcggagactttggagatttaggtgatatatttaactcatttttcggtggtggtttttcaggtggctcctcgagagctagaaaagatgctcctcaaagaggaaatgatatggaatattccataagtttaacctttgaagaggctgtttttggcgtagagaaatctattaatataactagaagtgaaaactgtgaaacatgcggtggtacaggcgcaaagaaaggcacatctcctaaaacttgtgataagtgtggaggaacaggtactataagagttcagaggaatactcctctcggaagctttgttactcaatcaagttgtgataaatgcggaggacgcggaactataatttctgatccatgtcatgagtgtcatggtgcaggccatgttaggaagaagagaaagataagcgttaaaattccagcaggtgtagatacaggtaatgtaattcctttaagaggtcaaggtgaacatggaaaaaatggaggaccagcaggggatctttatataagtataaaggttactcctcataaaaagtttaagagagagggttttgatatttatatcgatactcatataagctttcctaaggccgcacttgggactgatatgacagttcctactatagatggtgatgtaaaatatactattccagcaggaactcaatcgggaactgtatttagattaaaaggaaaaggtgttcaaagagtcaatggcggcggaagaggaaatcagtacgtcaaggtaatagtagatacacctaaggctttaaatgataaacaaagggaagccttgaagatgtttatggaagcaagtggagaagcaaagtcagaaaaaaaatcgggttttaaaagattttttgaataatatataggattttaattatttatgggaatcctatatagggaaattaggtaaattataatttattaaggtgcaatgatttataataaaaattgtatttgagtaaattaaagtttatcctggtttccctatatttattctcaaatattctattggaggaatttaattcatggataaagattggtttgaggtcagtgttataactagcagtgaagctgtagaagctgtaacaggtatattgtataatactcctgttaaaggtgtggctatagaggattctaaggacgttgaatttaagaagaagcatcctggtgattgggactattttgatgaatcattactcaatgttaaagatggtgctgttataaaagcttattataaggatgatcataactttgacgagagcgtaaaatacatagaagaaagtatagataaactctctgagtttggaataaataagggcgaaggtaaggtttttgtaaataaagttaatgaaacagattgggaaaacaactggaagaaatattataaacctaccaaaataggcgctagaattgtagttaagcctttgtgggaagagtatactccaaaagattatgaattgatgcttaatatggacccaggaatggcatttgggactggtacacatgaaacaacaagaatgtgtattcaggcgcttgaaagatatgtaaatgaagatgcagaggtatttgatataggaacaggatctgggatacttgcaatagcagcagcaaagttaaatgcaaagaaagtacttggtgttgatttggattcagttgcagtaaaggcagcaaaagagaatattcagtataacaatgtaaacaatattgaaatattacatggtaacttaatggaggttgtacaaggaaaagctgatataattgttgccaatattattgcagatgtaataaatattttaataccagatataaataaatttttaaagactgatggatattttatatcttctggtataataaaagatagagcggaagatgttatagaaaatttaaagaaaaataaatttgagataattgaagttaacaatcaaggagaatggatttgtatagtggcaaaattataaaggagtgtattttttaatgcataaatttttcgtgggagcagagaatatatgtgataatactgcgtacatatatggtgacgacgttaaacatatatataaagtactaagacttaaggttggagaaaaggttagcataaatgactgtaatagtcatgaatttcttggagaaatagaacaaataaataaagaaaacgtaaaggttaaaataatagaaaaccttgatataaataatgagagtccgctaaatgtgtacctttatcaaggatttcctaaagcggcgaaaatggatataatagtacaaaagaatactgagcttggaataagggaaattatacctttaattacacaaagagtagttgtgaaaaatgaaaaaagtgaattaaaaaaggttgatagatggaatagaatagcttttgaggctgccaagcaaagtaagagaagcgtaattcctaaagttaaagacatagctagtttcaactctgccattgaggaattaaaggagatggatttagtacttgtgccctatgaaaatcaagaaaaagtagggatgaaaaaagttgctgctgccattgaaaaaaataaaattaaaaatgtagccatagtaataggtcctgaaggtggatttgaagaaacagagatagaagaattgaaaaaaattggagcttacataattactcttggtcctagaattttaaggactgagactgcaggtcttgtatgtacatccttagttatgtatgaattgtccgatattggaggaataatataatgaaagttgcttttattactttaggatgcagagttaactcttatgaaagcgaggctatggctgaaaagtttataaaatccggatgggaaattgtagataatgatgaaaaggcagatgcctacgtaataaatacatgtactgttacaaatatgggtgacagaaaatcccgtcagatgataagtagagccagaaaggctaataaggatgctgttatagctgctgtaggttgctattctcaagtagagccagaaaaggttgctgaaattgaaggtgtagatattgttctaggaacaaaaaacaaaggtgatataatacactatgtaaataaatttatagaagaaagaaatcaaatagttaatgtaaaagatgtatttacagataagaaatttgaggatttaaatatagatgaatatcaagataagactagagcttttcttaagatacaagatggatgcaatagattttgctcctactgcttaatcccatatgcaaggggtggagtatgtagtaaaaatccagaaaaggttataggagaaattaaaaggcttgcggagcatggttttaaggaaattatattgtcaggtatacatatagcctcttatggggatgatttaaaaggtgattggaacttaatcagtataatagagaaagcagagcaaattgatggaattgaaagaataagaataggttccatagaaccacgtttttttgacgaggatacaataagtaaaataaaaaacatgaaaaaaatgtgccctcattttcacctctcacttcaaagtggatgcacagaaacactggaaagaatgaacagaaagtacacagcagaagaatataaggaaatagtttataaacttagagaaaacataagtgatgtatctataactacagatgtaatagtagggtttccgggagaaactgatgaagagtttgaaaaaacttacgatttccttaaagaaattgagcttgctaagatgcatgtgtttaagtattctcctagagaaggaactaaagctgcagctatgaaaaatcagataaatggaaatgtaaaagataaaagaagtgcagaacttattgaattggataaaataaatgagaaaaaattcatgtctaaatttttagacagagaaatggacgttttatttgagaaaaagcttgaagaaaatgaagatttgtatgaaggatatactcctaattatataaaagtagtagtaaaatcaagtgaggacatctcaagaaaaatacttaaggttaagctcacagaaattcaggatgaacatttattaggagagttgattttatataaataaaggaaataagtacaaaatgttgaatatatgtaagaggggggtgaaaacatggatgagtgcatattttgcaaaataataaaaggtgaaataccatcctctaaagtttatgaggatgaagatgtgcttgcttttaacgatataagtccagccgctcctgtgcatgtacttgtaatacctaaaaaacatatatctagtttaaatgatataaatgaagaaaatagtaaagtaatagcacatgtatttgtggttatatcaaaattagctaaagaacttggcattgatgaagatggattcagggttgtttctaactgtggtgaagccgcaggtcaaacagttcatcacgtacattttcatttattgggcaagaaaaaatttacatggccaccaggctaaaataaaacacttttataagcttatattattgtgaaaatattgacattagagctttttatagtgtataataattggtgtgttatttagcccaattagctgcatttgagtttcaaatttgaattgtgctagcggagggagggatataagatgtcagaaataaaagttggagaaaatgaatccttagaaagtgctttaagaagatttaaaagaaaatgcgctagagcaggagttctttcagaagtaagaaagagagaacattacgaaaaacctagtgtaaaaagaaagaaaaaatctgaggctgctagaaaaagaaagtttaaatagttttgaaagaaggtacgtaaatgtcccttaaagaaaaacttcaagaggactggaaatgtgctcttaagagcaaagataaatttaaagctaatgtaatcagtatggctaaagctgctattttgcaggtagaaaaaactgatggcgtaaaacttaatgatgaagatattattggagttttagcaaaagaagttaaacaaagacgcgaagctttagttgagtttgaaaaaggtaataggcaggatttagttgaaagtgctaatgccgaaattaatattttaatgagttaccttcctcagcagttgactgaagatgaaattagaattatagttaaggatgcagcagatagcgttggtgctagtaacatgaaggacatgggaaaagtcatgtcggctttaatgtcaaaagttaaagggcgcgcagatggttccttggtaagtaaacttgtaaaagagtttttaaataataaataagaaaatgaaggacctggtttatccaggtcttttttgttgtaattaaatcctttttccattcataaattagtatgaaagtgtgcgtttgagggtgagaggatgaataaaaaaagaatatataaatttagaagatttttggcaagaaagcttgattttccaagtgatgctgtaatgtatactcctagaataaacatatctgtaactggagatgaggaaataactattgaaaactacagaggaattgttgaattttcagatgaaaatataaaagtaaatactgaggttggcactatatctatagatggcaaaaattttgaaatagtttttataagtgggagcactataattttaggaggaaaatttaaaaccattgcttatgggggtgataaaaatgaagcttaaatttgagagctttaaaaatacttatgttgtggttgaagtgagaacagctaacattgaaaaatttataaacttgctttggagaaataaaatagaagttatgagtatgataagagttaatgcaaaccttattaggtttaaggttgcattaaaaaactatagaaaaacgataaaattagttaaagcggttaaaggaaaaataaaagtaatagaaagacatggtactggttttttgttttttagaataaggaatagactttctattttagttggaatagctgcatttatagcttgtgtattttatttatctacatttatatggcaaatagatatagttacagaaaagaatatagcaccttatgatgttagacaggatttaagagaaataggggtacaaccagggatgaaaaagagcagcctagatgtgtacaagattgaagaaaaattgatgcagaaaaacaacaatataatgtgggctagagttagggtttacggatctaaactcaaggtaaagattgttgaaagacaagaaattcctgatgtaaaacccaataatgaagctagagatgtattagcaaaaaaatcagggcaaatacttagagtatatacaacctcaggtactgcaatcgtcaaggccggagatgttgttaaaaagggtcaagttcttataaagggagaagcaggacaagatgataaggtatataaggttcatgcagacggaagtataatagctaaaacttttaatgagaacatagctaaggtaatgctaacaacacatataaggaagaggacaggcaaaaaggttcaaaattattatgtgcgaataggaaataagaaattttatttgaaaaaaagtgaaaataaatttaataaatatgataaaatagtagatgacaaatgcttcggtggaagggaaacatattacgaagttgatgataaggttgttaaaaaagataaagatgctatcgtaaaagagacagccaacaaaatgtatgataaaatgaaggaaaattatgatatgaatattaaagtattggataaaatagttgattcaaatgtagaagggaatatatgtacagtaagacttgtagtagtctgtgaagaagatatagcagataattaaaatactatttataatgtttaaactatgcacagcaaaagggtgaattataatgaaaatagttcaattgatgaagaaggataaatctataaaggtaatgacatttttgtttgcttttattataatatacgtcatattgcttacttctgtagatacgagaaagtattcgcttaaagaaggcgatattgctaaaaatgatattaaggcaaccagagatgtaaatgatgaagcggctacagaggaaagaaggaaacaggcagttaactctgttggaatacagtacgacaaaaatacagaaattataaacaatattatagataatattaacaatgattttactatcatgaataaagttaaagatgaaaattctgatgataagacaaaactaagccagcttaaaagttctctaaaaactgatttagatgattctaatttaagtgtgatattatctatgaacaaagaagatttaaaggatcttcagcaatttataattaaaacactgaaagatgcttataatggagaaataagggaagatgaatcatcagatataaaaaaagctcagagcagtattgcagctgaattttctaaagagaagttttcaaaggatgctacagaacttggtatagctatatcaaattcctatgtaaagcctaatatgtttattgactctaaaaagacagaggagataaaaaaggatatatcaaaaaaggtagaaaatgtggtaataaaaaaggatcaaataatagttaaagaaggggagcctgtaacggcaaatgaaatttctgttttagaagatttaggtcttttaagtaattcaaatggacaaagttggtacatatatgttgcattggccgtggcagttttaatagttttatttttacaaatatactatatatacagatattataaagagatatatagggataataaaaagattataatgctctgcgtacttaatataatatcaattatactagcaagatcagtaggaataatttcaccatttttgattcctcttgcgtgcgcccctatgcttatgatcttattaatggatagcagaatttctttgtttgaaagcatactcaattgtatttttatatctttgatatgtaaatttaatattgaagttactatattagcacttatgagttcagttatagctttcatgagctttagaaaaatgaagcaaaggaatgatactatatatgcagcactttttatagctataatgaatgctttgatgtctttttccattggatttcttgtaagcagtaatttggtagataatgtacagaaggcaagtttcgcatttatagctggtatattatctgcaatattaacaatagggtttcttcctatttttgaaagtatatttgatgtggtgacagatgtcaagcttttagaattatcggatccaaatcatccattaattaaaaagcttcttatggaggcacctggaacttatcaccacagtataattgtagctaatattgctgaggccgcagttgaagaggtaggtggaaatgctcttttagctagggtggcagcttattatcatgatataggaaaattaaaaaggccatatttctttaaggaaaatcaggtgggaggaaataatccgcataataaaataaatcctaatttaagcgcgctagtaataatttcacatgttaaggacggcgttgatattgctaaggagtataatatacctcaaattatacaggatacaatacaacagcatcatgggacaactcttgtaaaatatttttatgtgacgcttaaaaatgcaagtgataatccagaagatataaaagaggagaattttagatatccaggtccgattcctagcagtaaggagacagcaattataatgcttgcagatagtgtagaagctgctgttcgttctatacaggaacctacacaaggaaagatagaagaaatgataaacaatataatagaagctagattaagtgacggtcaattaaatcaatgtgaacttacacttcatgatatagagaaaattagaagagcgtttttaaagtctcttcttggaatatatcatcaaagaattgagtatcctacagataagagtgtaatgagacaaaaaaaaattgagtctagcaaagaaaaaaggaaataaagtaaagggagttaagtatgatttacatagataataggcagaacagtattactgtagatgaaaatttgcaaaatactataagagaagttatagactatgcactcaaagaagaaggtatgaaaatatcttatgaggtttcggtaatatttgtagataatgaaactataagagaaataaatagagagaacagagaagttgataaggttacagatgtgctttcgtttcctatgcttgagtatggtgaagggaaggtttttaaagatatatacgaagagtgtgattttgaagacgaatattttgatgaaggcaatcttgtgttaggagatattgcgctatctcttgaaagagctgaggagcagagtaaagagtatggacattcgtttttaagagaagctgcatacttaacagttcattccgttcttcaccttatgggatatgatcacatggttgatgaagataaaataaaaatgagaaaaagagaagaagaaatattgagtcattttgatataaatagataaaaattaataatataggatgatgagtatgaaacctaaaaaattagtagatagtttcaatcatgcacttgagggtataatttatgcagttaggacacaacaaaatgttagaattgatttgattgcggctcttgtaatacttactatgtgtttttttacaaatttgacaagagtagaacttttaattataacaataacaataacaatggtaataagtgctgaactcatgaatacggctatagaagccacgatagatttaacatccaactattaccatcctctggctaaaattgcaaaggatgtagcggcaggagctgttgtggtaacagctattaatgctgttatagttggatttattgtattttgggataagcttgagccagttacaaaccatgttatatataagataaaaaattcaaatccgtatatgatatttgttattttggtgatagtatgtatacttactcttataataaaggctatttttggagaaggaactcctttaagaggaggaatgccaagtggtcatagcaccatagctttttcattagcaacaataataacattgatatcacctcagcctgtagttataatactaagctactttttagctgtaatagttgcacagagcagggtggattcaaaagtacactcttcacttgaagttgtatgtggtgcggtttttggatttttagctacacttttgttattcaaactgtttcactaggaaaaaaagtaaaaagtcttttatgggcgaatttagttaaaggtgtatggaaataatattaattaatagaatacaggagagttaaaacactcaaattaaggaggacttatgtttaaatcaggatttgtaacaataattggaagaccgaatgttggaaaatctactttacttaatcatattatgggggagaaattatctatagtttcctcaaagccacaaactactagaaataatatacaaacaatacttacaggtgaggaatatcaaattgtctttgtagatactcctggaatgcataacccaaggcataagcttggtgagtatatggtgaaggttgctaaggaatctatgaacgaggttgatgtagctttattcgttactacacctgatgtggaagttaaaagaggagatttacatatactagagcagctgaagtcagcaaaggttccagtttttcttgttgtgaataaaattgacgagacaacggaagaaagacttgcagcaactttaaaaaattattccgaggcttttgagtttcaagagataataccaatatcagcacaaaaaggaaaaaatgtagataaattaatagaacttatggtaaaacacttgaatgaaggtcctaaatattatcctgatgatatgataatagataagcaggagaggtttataatagcagagataataagggaaaaagcacttaggtttttatctcaggaagtaccacatggaatagctgtcgagattcttcaaatgaaggaagaaaatgaaaaatataaaatcgaagcaactataatgtgcgaaaaagattctcataaaggaattattattggaaaaggcggagaaatgcttaagaaaatatctcaatctgcaagaaagagcgcggagaagtttctagataaaagggttaacatgaaaatatgggttaaggttaaaaaggattggagagatagtccttttgtactaggtgagcttggatataaagcgcctaaaaaataactcttaagtatatacatatttaagctggttaacctataattaaagtaaaataggataaaataatagaggggatgataatctggctttatttaaaagtagaggagtagttctaaaaagtcaggatataaatgaaaatgacaaaattatatggatttttacagagaagatgggtaaaatatctgtaatagctcgaggagcaaagaaaaacagaagcaaatatctccctattacaataaacttttgttttggaaactttgtgttttttaagggaaagagtatgttttctttaaatgaaggagaaataattgactcctttcaagaatttttgagtgattttgatactttaacttactgctcatatctatgcgaacttatagatatttctatggcagagggagaaagcaatagagatctattcaaagaatttgtaagtaccttttacctaataaaaaacaaggttggagatatagaaactttatctcgagcgtttgaactaaaacttctaaggtatacaggatataatttgaatttagactattgttcaaagtgtaaaaaaagaatcaattcagcttcttatataagttacaagtattatggtgggatatgcggcgattgttctaaggaaggaggaatgtcagttacccctgcggcatatagcagcttaaactacttaagcaaattacctatagaaaaagtatatagggttaatttaaacgacaacataaagaatgagatgtttgaaatattaaggggatttataagtcaaaactatgctaagatacctaaaagtctagatttattgaatataataaaagaggagtgaagaaaatggaggaaataactttagaaaaggttgatattataaaagagagaactggagttacatatactgaagctaaggaagcacttgaggcttcagaaggtaatgtaattgatgctctaatatatattgagaacaatactaaatctcgcaaagataatctttatgaaacaaaggatgaatttgttcagtggattaaagatactatgaacaaaggcaatgtttcaagaataagagtaaaaaaagatgatagagttatattagatataccggtggcagctggagttgctggtggtgttatagctggagctgtatgggccccatcacttgcaataatgtttcttacagctgtatttgcaaaggtaacagtagaaataacaaaacaagatggttcagtagaagttgtaaataaagttgtgaaaaacactgtttcagatgtaaaagataaaataaacgaagtaaaagacaaggtaatgaataagaagtctgatgacaaaactaacacagataacgcttaccagtatacagttaaatttgatgaggtagatggtaataacgacaacagtaacaataataacaataataatcaaggtcaacaataaatgttagcacattagtaatagaacacagtttgattactaatttatacgtgtcaataaattgtttggaaattcaatattttggcacgtataaattaatttacatataaattagtcacaagtttaggcttacgttaaattttccctctatataattggaaaaattataagcaaattttagatgaagctcactgtattttgtagtgctttttataagatttatgaaggctgctttattgcatcggcttaaattgttataataatctttgcatattttccaaaatttttgtgggaaaaccaaataggataatatatacaggtattcgtcaaggttcaatgggtttatttgttcgtaaacatttagcatatttattaatagctcactattccatctagtattatctctcttcattattcttctcataaagtatgatatatcatgaacagaataatcaaatttacacttatcgaagtctattacccaaatatcattgtttttgtcaaagattatatttttgttaacataatctaaatgacataaactttttttgaagtttctgctttctattctagaagaagcatttaaagctattttagaaagctttatacataggtcgcaattattaagtgcaattttagaaaaagagtcgtttatttcataagctttattaaaaaaggatagtatctgttcaaaatgttttttgtttgataaatatatatgttcaaaaccgtatcttatggagctaccttgtatggagaaaaacttttgagaacacttatgcatgtgagctaaattcttagaagctttaaatagatcttcttttttatcgtagttgcactttagtccatcaatccagggcataagtataaaaatcattcctgaatatattacaaaacgtgagttatcaagtgtaggtagaattcttgttacattaatgccgtgcctaaaaaaccattcagtagttgaatatacaaatagaagctctcctttatcatagtatacttttttcaagcagtattttttagaacctaaagttagtttatacacagccctttgtttttcagtatctttaaatttaatttgtaatatttccgcatcttgaagattatattttggtaatatatatttttttattgaatcctccggaagaagaatatgtgagggattagttttttcaatcactgaatcacttcctaaaaattatcttatatataatgatattaagaaattttttataatatacattaaataaaaggattttaaacatttatcaagaattaaatgttataggaaaaataaaattacttctatattttttcaattttagaataaaaaacaccattgaatgggtaaactaagagtatgaatagaataattttattattttttaaaataaaatttctcaaaagaaggatttaaactttttttgtcgaaattaattatgctcatgggaatttagttgttagggtggaatgtcttattatagctgaagatataattcaaaaagtaaaagatttaaatgatatagtggatattgtatctgaaaaggtaaagcttaaacgtacaggacgtaattattcggggctttgcccatttcatcatgaaaaaacaccgtcatttagtgtatctcaggataaacaaatatataaatgctttggatgtggagaagcaggaaatgttataacttttgtaatgaagactaaaaacttttcttttgtagaggcggtaaaataccttgcggacaaagttaacattactatagacgataataaagataagtactatgcaaaaaataaagagaaatatgacaaattgtatagtatgaatgttgaagcagccaggtatttttttagaaatttagattctaattcaaaagcaaaaaaatattttttggatagaggaattaatcaaaaaaccatgagaaggtttggacttggatatgctaaggatgactggagacagcttctaagttttatgaaatctaaggggtatacagaattagaacttattgaagcaggacttatagtacagaaaaataaagctgtctatgataggtttcgaaatagggttatatttcctgtatttgactataaaggcaaggttatagggtttggaggtagagttttagatgattctaaaccaaaatatttaaactctccagaaaccaagatatttaaaaaaggaactaacctttatggactaaattttgcagtgaaaaataatataggggatacaattataattgtagagggatacatggattgtatatctcttcatcaatatggtataaataacgttgtggcttcgcttggaacagcacttacgaaagatcaggcaaagttgttaaagagatatgctagtaaagtggtaatatcatatgacgctgatacggctggtcaggctgctacacttagagggtttgatatattaagagaagcaggatttgatataaaaataataaaaatcccagatggtaaagatccagatgaatttgtgagaaaaaatggtaaagaggcttttatgaggcttgtagagaatgctgtttcaattatagactacaggataaatagggcctttgaaaacgtcaatttgaaggatagcgaaagtgttataaaatatgttaaggatatttcggaaataatcgaagagttagatccagtagagaaagatgtctatatcaagaaaatttcagataaaacgggaataagagaacaagcaatttatgatttgattagtactgatattcagaaaagtggcaataacattgaaaaaatgaataaaaatagcaattatggacaaaatttatatgtggaatccgcacacgttaaatccgaaagatatttacttagattaatgattgaacataaagatatacgcagttatatagagtccaaaattagtgcggacgatttaataatggaaagccataaaaaaatatataacattatattgaattttgaagataatttaagtagtgatctaaaatctaaatttggttttattgaatcaagatgtgatgatggggaaagttcctctgaaattgtaaagatagaagaacagaatataatgctttcagaaaacaatgttaaagatcttgtagatgattttattacaaacattaaaaaatttagattagaggagtcaaaaaagaagattatgagtgaaattaaaggccttgaagaaaagggattgtttgatgagaccattgaacttatcaaaagaatggaagaaatacaaaatcagttagacaatctatagaataacggaaggaggttttcattaatgaaaaataagactgaagttaaaaacgggggagaaaagaaaaactcaaaaaaagtgtcaaaagaagaaagcgcaaaagaaaaaaatgaaaaaatgaaaattgtcaaaaacttaatagataaagggaaaaagagtggaagtttaacgtataaagaaataatggatgaacttcaggaagttgacctaggaccagagcagatagaaaagatatatgaggttcttgaatctgttggcgttgatgtagtaggtgacatgcatgaaatagaggttgaagaagaagatttagatttgacaatacccgagggaatagctatagatgaccctgtaagaatgtaccttaaagaaattggtaaagttccgttgttatcaccagaggaagaaattgatttagcgcaaagaattaaaaacggtgatagatcagcaaggaagaagcttgcagaagctaacttaagacttgttgtaagtattgcaaaaagatatgttggaagagggatgcttttccttgatttaatccaggaaggaaatttaggactcattaaggcagtagaaaagttcgatttcaaaaaaggatttaaatttagtacttacgctacttggtggataaggcaggcaataactagagctatagcggatcaagcaagaactataagaattccggttcatatggttgaaaccataaataaacttataagagtctcaagacagttgcttcaggaattaggtagagaacctcagccagaagaaatcgctaaaataatggatatgccggttgataaggtaagagagataatgaagatagcacaagagccagtatcacttgaaacacctataggagaagaagaagatagtcatcttggtgattttattccagatgatgaagctcctgctccagcagatgctgctgcgtttagaatgcttaaagagcaactcctaaaaattctaaatacattaactcctagggaagagaaagttttaagacttagatttggtctcgatgatggaagagctagaacacttgaagaggttggaaaagagtttaatgttacaagagagagaataaggcagatagaagcaaaagctcttagaaaactaagacatccaagtagaagcaaaaaattaaaagattatcttgattaataaatactaaggttatccttaatgggtggcctttttatttttagctaaatatattggaagagtacctctctttcaactgatttttatttatgatataattatgtataaaagaaggtgagaaattggagtatataaagccgcataaaggattttcaactttaattattttaggaataacactagggattgatttaatattttcacttttaagtacttttattaatacatacatagttttgcgaattttagaaatttttattgtgttttttaatatatatcaattatattatatacttaaaagtttaactcttaagtattgctatgataatgaaaatttttatgttttatggtgttttggaattagaagggtaactataccattcaaagaaattgaagcatacaatgtctctcatggagaaataaagggagtaaagttgtgggggtatggtaggaacttctttgcattaggaacattttctgtaaacgatattggtatagttaatatgtttgttactgctactaaaaatgtaatctatataaaatgcaattcttccatatatggcatttctccagaaaaatgtgatgaggttaaaaactttctagaaaaacgtaaattagttttgaaaaattggacatacgaaaaacgaaataaagtgtctttgagtaaggataggcattttgacatactaatttttttaatttccatagtgattttaatggttacaataattccttttattctatatttaaggggagtaatgccgcataagatgcctttaagctttgattctaactttaaacctatgatatatggaacgtccagagaatttgcttttaagcatatgatgtacggagcgtataatatgattatattcttttgcatatattattcagcgtatttttatgcaaggtatagtaaaaaattagcctataggctcatgtatatttcatttttagtagcttttatatttctaatatttcaatttaaaatttatgttacatatatacattagaaagttggtgcagcaatataaatggaaatatcaaatagacttaaatcaattagcgaggttatggacaggtgtgaaattgcagcagatataggaacagatcatgcatatttaccaatataccttataaaaaataacttatgcaaaagatttattgcttcagatgtaaatgctggtccgttgaaaaaggcaataaacaatataaataagtataaacttgaagataaaatagagtgtcgtttaggttcagggcttaatgtcttaaaactggaagaggttgatgttgtagttatagctggaatgggaggaaatctaataagagatataatagaggagagacttgatatatttaagaaattaaaatatgcagtgcttcaaccagtacaaaatccagaaatacttagagaatatcttattaaaagaggctttaatataattgaagaacaattatgtattgacgaaagtaaatattatgagataataaaagtatgctatgattccaaaatagaagataaagatgatgtgtactatgaaattggtgataagctaatagatatgaaacatcctcttttaaaggaatatattaattacaaaataagaaagtatgataaaatatacaagaacataagtgaagaaagcttaaatgccttaagtagaaaaaatgagttgtccataaaaattcggaaattaaaggagttgttgtcatgtctttaaaggtaaaagatttatgtaatataatagaagattttgcgccaatatcacttaaagaagattttgacaatgttggacttatggttggagatagagaagcttctgtggatgccataatgacagctcttgactgtactatggatgttatagatgaggcaatagaaaagaattgtaatatgataataacacatcatccaatactctttaaaaagccttcaaaaataacaatggatactcttttaggtaaaaagataattaagataataagtaataacataaatgtgtattcggcacataccaatcttgatagtgttaaagatgggattaatgatgctgtagttaacatattaggatttgataaatcaagtattttagctaagaataacaaagcagtaaaggaagctggaattggtagagttgtagaattagagcaaaatatgacacttaaagaattgtgcgatagagttaaagaaagctttaaaatacaaagcttaagatactgtggagatgaagataaaaaaatacacagttttgcagttataaatgggagtgggcaagacttttttgaagaggctagaaagagaggagttgactgtataattacaggagatacttcttaccactatgttagtgattacaatgagatgaatatagctgttatcgatgctggtcattttggaacagaatggccatctgtagtagttatgtcaaaaaagcttgaaggtgctttgcataagatgggcataaatacaccaattttagtttcacagaataatattgatccatataaatttaagtagatatagaggttttctatgtctacttttatttttacataaaatagacaatctatttataaatgctgttttattaatattaggtaggtttttgtaaaacaaatagcttataaatatattaaaatgtgtttaaagtcacattttagtacatatgtaagttaagttttatagtataaaacctattattgggaggaagagatatgaataataatgtagaattagcatatttaattcaagaaaattatgatctcataaaagaaagcaaaaaaatacttagggatgggtcatatatctatctgctaaaaaaattaaaaagcgaatttgaaactgccaagaaaaattatgtaaacagaaaaacagaattagctaaaataaaacaaagctactcagctataagtattgaacttagaaaagaaagagaaaagatggagactaatgaatataagttgtataacaaagctggttctaatttaaacatgatagaaaagttagaaggagcaattgaaattgaaaagcaaaacttaaagaatctagaagatgaggcagtggatttattagatgaagaagaaaagttgaaaaaggaaatagaagatttaagacttaagcttgtaaatataaaggataatttttatgactataaggaaaaaagtagcgaaaaggttgaaaaagcaagacaggaaatgattgcggctaaaacaaaaatagaagagatcaaaagtaaaatacctaaggagttatttgaagagatatcacatttgatgtcaaaaagcagctgtgcagttgcaaaattaaatggagagatatgtgggggctgcaggatgaaggtttcatcaatgacaatagatgaccttataaataacaacagtatagttcattgtgataactgcggcaggattttatattacgatgaaagtgaaggaaaaattaaaagaaaatataaaagaaaaataagagcgtaattatataataaattttactattgatataatataatatttatgttatgatattctatgcgagtaagccagacaatcgctgctgcaatttgcaggagaggaaagtccgagctccatagggcagggtgccgggtaactcccggtcaaggcgacttgaaggaaagtgcaacagagatataccgccattttataatggtaagggtggaaaggcgaggtaagagctcaccagcgcattggcgactttgcggctatgtaaaccccatctggagcaagatcaaatagggaagcgttttggagtggcccgctctgcttccgggtagcatcgcttgaatcttatggtaacataaggtctagatagatgattgtcgaatacagaactcggcttacaggtttagtcgtccattgaaaacactaggtttcgtgcttagtgttttttattttgccaccgatttgccatactattcgtttaaaagcaaagatatgtgttaaggataaagaaatgtataccgatattttatgaattaataatataagagttttaatattccttcaaatggagtggaaggtgaattatctacatatttagcagtagttatagtaacaaggctgcaccaaagagcgtttcctaaagaaagccaattagctaaatgcattcctatagttgcagtaatcagcagtaatcagcggtaccaaataaactatatggttattttgatttgatattttattgatgagaattaaaatttatatcaataaaaaaggctattattgacataccgtaggaaaacccataaaataagaagatgagtaggatatgtataaatgttttataaagtccaaggatggtactttattatattacataaactttaataaagagaaaatttatgacataaaagtggtgatacaaatagcagataaaatattagtagtaatctctaaaatggattcatttataggagaattaagaaaaggaatagataaaacagaagctgttaaaaaggatatacaagaacagaggcgaatattaattaatggattttgttctgatgcaggtaaagaagttcaagagaatgtaggtaatcttttaaaagtctcaagaaatattttagatacaatgggaagaatgtcagtaaaattaaatactgcaaaaacagaatttataaaagcagatcaaaatagttttaagacaaaaagttttcagcctaaaaggatttatagaggagaaaagccttcaaaagaggcagcagataaagcacatataatacctaataataagctcgaaattgaacttggaaaatatataatatgttatctgattaaggagaagctcgaatcagacaagctaaaaaaagaactagaagtaggagatttcgatagcatatgtagagattttgatggtatggatttggaaaatactctaaatgcgataacattaggagaagcaggagcagcaattgaaggctttgaatcattagttaatggagcctcaaaaggattgaaactacttaaaataggcatagaaggagcgaaaaaagctttatcaaaactaacagtggaggacgtagccttagcatttgcaggagcaaaaggattaataagaatagaagaaactgttaaaaatttagataaagaggaaggaataataaaggcagcattagaggcagcaaaacaaaaattagataatttatctaagatagtgactgatatgaatagtgttgaaaaaaataaaagcttacacggagaaaatcttgttaaggaagtaagtaaaactgaaacatatactgatgccatgaaaaagtatattatagttccggaggatggttttcaagcgttacttgagaggaaatatattgaaattagaaaatcaggtttaagtgatgttaaaacagtttcaaaaaatacaggattatcagaacaagatattgtagatatgaagaaacatttatttttaaatactcatgacttatctataggaggaagcgctcctaaaaaattatattttcaggcagatccggatattgcatatgcttggcaaaaagcacaaagcggagaacttacagagttgcaaaaaaaatggtttaaaacacttagaaatcatgagataacagaaaaaaaatctatggataatggaatgcttttaaggcatccatctacttggaatgcggaaacagagcaattcacttctaatcctttaaagaatgcacatgacaaagcaaatttgacttctccaaatccaacagatccatttcctggatatgatgcagcatcagattttattaaaaatattgataaagatattaattactaattttgaggtgataaaatgtatatgaaagaagcaattacaaggattaataacataaaatggaatgtagttggcacaagtgagtcagaagaagaaagtaatttaggttatgagttcttaagaaggttagctaaattctttaaggacgaatcaataaaaccagtaaagccactagttgcaaatatagctaaactgcttggtgatacagaagaagaaatagatatttctaattattgtacttcggaagttgtggggttttttggagaaaacatatatatgagaaatgtggtgcaatattatatacaattagctagatatgccgataaaaatatagatgctattaaatatctaagtgtatatgaaccagcaattagaatatttgaaagaggaggtatgtttgttcttaagataaacgcattagatatagtaaaggttgcacattttccattagatagatggtatgaaagatttgttgaaaaagaacctattaatatagatggaatatagttgttgttaagaaggagtaacaaatataaactaaaaaagaaggtacatattgagagtgtaaaatagtctgtgtaaacttcagaagatgatataataaattatcagaatgaagggagcatggactatgttttctctgaagatgaactaataaaaatacttgctaaagatccaaatgtaaaaacagtcgaggatgttcaaaatatattgaagagttgtttaaaaatttgtttcagcagatgttcaaaggagaactggacgaacatataggatatgctaaacataactataaagataaaatttttcattttaagttgcagaatcttattttttatttctggtaatgcgacaatgaatcataaaaatgcagaagcaacaacaagggtagcacttatatgcctgatattttaggtaataagattagtatttgcatttttgtatagaagcgaacggaaatgagtgctaatggaatgatattagctagtatttcagatttaatagcatcaatttttgctatcttaataagtaatatcatatctttcatattttgttttatagcatgtatgctatttttgttgcaggaatattaggatatagggctaacgcaaaatagaatggtagcataaataaatttgttaccgtactaataaaatatatatttctacatagtagtgttaaaagataaattattcaaaacagagaaaacatacttagatagtgaggaatatatgtcgtataatattgataataagtttgaattgcacaaaagatgggttgagacaagtggtcatgagggtgaaaagttatgtttagaggaagtagattttagaaaatttgatttatctgataaactgtttgaacaagcaaatctagcagagtgtgtatttgacaatcttaaccttgaaaatatagattttcatacatcacttctatgttcatcaacttataaaaatactaacttaagaggatgtgatttttacaaaacagatttaagttatacagatttttctgatgctgttataaaaaatgttaggtttagcaaaagtgattgttgggaatcaatatttagaaatgttaatttaataaattgtaatctgataaatgattacttttacttaactgattttagcaatgcaacattggataatgtagatataagtctatccacatttgaggagacattactaaatggagtaaaattaagaaatattaaaggtatagaagaagctcattttgaaagtattaatattggtacatttgagaaaccgatattgctgaaatcacaagaagcaaagaaatgggtgttagaaaactgcttgtagtaatgataaaaaacaaatttgttttaagataatctataaataaaataatccttatttgtaattatcataccgaagtgaaatataatgaatcatttgaaaattaagtaggttggtttattattttttgtgaataaattcatctcaagtagcattagtgtttgcaggaagaagagattaacatgagtagtaataaaaaatctaataaattcaatttatcatataggagatatttttgaatacgataaggatatttcagtaaatgatgcattaaactatttagataaaataaaaatggagttgttaaatctacggacaatgaaatcatagaagtgtgtattgatgttatttgtgcagcatttcttcatatttcacatttagatgattttgatatatcgttcttaaaagaatatttaaatattgaaaccaaccaaattgtagaaaacatcataacaataatgggagcaagttgtaggatacagtatagaaacataataagtaactatctatcatcagataatcaaaatattgttgatgctgctgaggaagctttggagactttggattttatggtgcagcaaaaggagcgttaaaattagtgattttaacataaaatgtgtaataaaaatgtataggtagagaggaaataataacatgaatataatggttgacagaaatgaaaaacttccgatattcttccgacattccacaaaataaactaagataaattagaataaagtaaaatataagagtgcttataaagttagaatttgtaaggctttaaagatatattaagataaatgaggatacataaaaataccgctgttcgcaaatacagaactcggcttacaggtttagtcgtccattgaaaacactaggtttcgtgcttagtgttttttattttgccatactattgccatactaatcttttaatatgtttagtagtttttcagtggcagctttttgcatgcttttattaacatgagaataaatattagcagttgtagcgatatctttatggcctaaacgttcctgtataacttttaagtcagtgccttgttgtagtaaaagagttgcatttgtatgccttaaatcatgaaatctaacatttttatttatttttgcagcttttaaaacttttttaattttatttgtatataacatgggatgaatatatttacctgaacaccatgtcataatcaagtcataccttttaccatcaaacatgttatctttgtaaaattctttagcattcgatttgttttctaattgtttatgatgtagagttttcaataaacttaatataaaattggaaatataaacagacctttgactttctatagttttaggagaagacatttttacatatccatttgtataaattaaattgttttttatggttaaagtgtttatcactatagtttatatttgaccactctaatcctccaagttctccacgtcttaatcctacttctagaactagttttaacgctatgttaaactttcacaggagcaccacagcaagcaaataatgtaactacacagacgaatatagatacatcatctatatcgagcatacaaagggaattaaataggcaaggctttggcaatttaaagatagacaatattgcaagaaaaagaactttatcagcatgtccaacagtccataaatattcaagaggaaatataaactaagtggatttaagaaagacttggagttaacgcagacggtataaacggataccaaactcaaacagctattaagaattttaaaaggtaacatggattatattcggatggaattgttagtaaaaatacatgaagagcattattaggactatagaaatatagttctttttaatataaaaaaataaaattttgggggtaaatataaatggaaaaatataattttataattgcattattaataattttaggagtgtgcggagttgtaggatacggatttgcacatttaaaaaagaagggatttaaaacacaggcaccgttttagacggagcacaaacagtagtcggagatgttggaactgcaataagggcagctgactctttagtacctaataataaaactctaaatttattagatataattgacaaaatagtatataaatctgtcatgggaacaaaacaattatatatatcatcacagttacctgcagatcaaagaaaagataatgcaaaaaaacttatatcagcaggactaaaagtagctaacataagcgagactctatcttcagatatatttatagatgcagtactagagcagattatatatgattccaagatagatacagaaaagaagagtcaggagcaaaacactttacaattacagataagccaattaactacagaaaaagcaaaattacaggctagcaatacagagttagtaaataaaaatacagagcttactaataaacttacttcaattcagagtgccgtaaaataactaatatatcagatgagtatctggtgtaatgcaaaaaaacatttcaggtgcttattttgcttttcattaattgaaaacaaacaagaatctgggcctaattgccaagatgttttataaaataagtaataagccttttatcattattcatagttctgctttataccaaaattataattatttaatccatgtatgtaatattgaggtaaattatgctattatataattaaatgcaaattatagagtagaaagataaaaatggcagaaattagtattagcccagaagatattgaatatgatgatagtagcatggtatctttatatagtaattctgtaaggatggagacgagtatatatgatttacaatttatttttgaatctcaatattctaaaaatggtaaaccaacaattaaacaattggcaagagtaattatgagtcctcttgcaaatatgttaaatcgcaatatatttgagtacgaaaaaaaatttggtgaaataaaattaccaaatgaattataattgggtaatcagtaaatatgaataaaaagcagaaagaaattaataatagtatatacatagaagattctacacatagtaatatattatatacacaggagtttgttgaggaattgttccatgaagggtataaattaggttttttacaagggactacatatgcaaataaaatttttaaatccaaatctacagtagatttaaatatggaggtggagaagttgtcggtggagattgaaggaatcgctaataagttaaaaaatttaaacgacattataatcaaccaaaataaacttaccaatgataacttaaataacctatcaagtagagtgaacgattcatcaaaaacattaatgaacaaaatagatgatttatcgcatagagtagaaggaatagataagagaacgatagttttgaaaaaaagtttagattatataaaagaggatatatgcgataatataaaaagcagtataaaagatataaaagaagacactaaagacttatctataattagaaataatataggtaacatggatgaaaaaagtaaatggtggaagcaatttttactagccccaataatatcagcaacattatcaggagttttagttgcaattatcatgctttgtataaaaagcatcaaataaaatataatctatgaaaacaactgcgaaataactaatataagaaatccctagagtagcataaaaactattctggggacttttattttagattatttgtaacggcgtttatgaattaggaaatatctttgtaagcttagggccataataatcactattatcataataataaacggatatatctctttgtagaaggctaccatttttatcaaaagcgttaacttcagcgaaataagttccaaatccataattactatatatatctgcaccaaatgatatactagtagttggtgcatcatgaatcccgttaaatactggagtagcaaatgttccgttattaaatgttttttcttttgatatagtaaatgtataataagctacatttactacgggattccaactaatagttccatttaaatcgattgtaggatttaataagttagtctccgaatcatataatttactttgtatatttgtatttgatttattggttttagccatagtagttgctgaaacggataaagtacttgtaccaataatagaaaaagctattaatagcgatgtgattttgttaaatttcataattaatactcctttattttaagtaataccaagtttgagcgcctacaataccatctaaagcaagtggatctgaatagccatttctatgaaactcacgatcaatgcgtctctgaaagtctactacagcagaataagtagcactaccaaaaattccatcatcgtaaatacctaatctacgttgtatatctgcaacaggttctcctgtatcaccttcttgtataataccgccgttgtcaataacttgctgagctgtcatataacgaccaaagctagtaccatatgttctagtagaagcaaacattttagatttagtagcatttaagttagtagcaactggtgcggatacttttggaataggatgattttgtataactgtgggtatagcagcaaaagcactagaagaaattaatacagtagaaacaattcctaaagataaagcttttaattttaagtttttcattttgaatcccccttaaatttcattaaatgtatttttaatacaaataaagcgtacaacttatcggaataaatgtaaaatgttgtatttaactagttctcattgtaattatctaaatgagacaatctacgacgattaggtgtaaaattgttactttaattaaatattccaccaattttaaatattctgtaattttaatgttgcaatgtagcatgtatggtaacatttactttaataataactaagtgttaaatatcttttttagtaaactatatgccaatataggttatttttataccataatgtatactaagtaggtatactattatacaattatttacaatattcttgaataattatgaatattttgttaaaataaatgttggacaaactaaaggagatgtttttattgaaaaaagtaataggtataattagtattgttttatttgtgttaatttcatttcagagttgtgcggcaggagtaagcaatgctcttgaaaagtcaaaatcatcaagtggatcagcaggatttattctcgcagtatgcatgttaattgcaggtataattgcaatagtatcaaaatatagtaaaggtatgactattacatctatagttttttatgctattggtggcattataggtatcgcaaatgtgggaacatataaagatttacaaatatggtctatattaagctttatatttgcagcattaattatatttcatattgttaaaaataaagaattgtatactggtacaaaataaaaaaagggagcatgttattgctccttttataatttacttaaaagcaaaataacaatagaaaatggaattatatgagatgctttttaaaatatctatacttaacttagaagaatacattactaagaggaaaaaggaagataacttaaataaatttgatattaaaaatttacttcttaatttttaagagtttttaatatgctgcaaatatcatttatatcttcagtacttagctcatcaaagttatctaatttagattttatattttcaattatttcgtttctgtagcttataccattctttttactaataaagaaggttgagatagttcctgtaagcatacttaaaaaacctatgcctataagcataagtatactcgctattactcttccaaatggagtggaaggagatatatctccatagcccacagtagttatagtaacaaagctccaccaaagagcatttcctaaagaaagtccctccgttaaatgcattcctatagttccagtaatcagcacaaatattgtagtataaataacatagtgaaaattattggtttttacaaattttgtaaaatggcttttaaatcttagtagcagagaaaatgccataaataattttagaaatttaattagttttgtaaattttaataatttcgatatttttaacaatctaaagccttgaaaaattgaattaaatggaatgattgaaagtaagtctattatgttttctttgaagaatttttttttatcttttgatatataaagccttaagaaatagtctatcgtaaaaataattaagataatattatcgattgtatcaaatatgtatagagtttcgttggatagtttaactgataattctatgattaacataatagatgcaattaaagctaatagagatgaagttaattcgtatagtattttattatgcgttgtaatattcaatgtaaatcccccttatataattatattattttataaaacaggtataatttcaagttgatgcaatttccatatttgacgtatagattgagatatatagctatagtttaatcaaataccaaggtttagtatattttaaaagtgttttatagctcaagtttaagagggtataagatgtaactattgacaaatgttaataaattgttacaattaagtgagtattattagtacaaaaggtattaagatacaatctttataaatgattgcttcaatggagttgtcttacttatattacgtttgattattagtttcataaaagttatagtggaagtgggaattgttctagtatcattaattacaattggagttttaattctactatataaatatgagcagaggtctgaacgtaaaataaatatatatagaagggtaatggtaaaatgaaaaagaaagtgtataaaaacagattggctttatttttaagtgcaattataattttaacatcttttgttggatgttctgaaagttctacaagtaaaaaatccaatagtaatacagcaaagactatagccaagcctaagcctaaaacagcacaatcagtactagatgaattaaagaaaaaagaatcagcatatatgacaaatataactgttgttacggctgataatgattcaaacaagcttttaggcagacctaaccaatatacggaaaaagtaacatggaaagataatagatctaaggattctcaagtagattgctcaattgagttgtttaaaaataaggatgatgctacagcaagaaaagattatttagaaaaaataataaaatctatgccgatgcttacacagtacatagagcaaaaggataatgtattactaagaatagatggagtgttaacacctgaacaatctaaagaatatataaatatttttaattccatttttaaaaattagatgatttataaaagatggtgtgttattttattaactaatgttgacaccataagataaatatgtaatactaatcatatagagtaaacatttacattaagactagaagaaattcaaaatggctatagagaatttagagaataagccgtgtaaaactgaatttgcttagtaaatagtattaacttttttatattagaatgtactattttagtaatagctaagtaaatttgaaaatctatcttgtgcaatattgaaaagtattgttttaaggtaggataagttttatgcggctattattttgtcaaaattcatatagtataagttttggagggatggctttaagaaagtataataagctcaattgattttacaatttaagaggagttgatgctatgacaattttttttgcagaattagtaggtactttattactcattcttttaggtgatggtgttgttgctaatgttgttcttaaaaactcaaagggccacgcttcagggtggattgtaataacaatggggtgggcatttgcagtagcaattccggctttgatttttggaagttacagtaatcagtttaatcctgcattaacaattgcgcttgcggtgataggaaaagtagcctgggctaaggtaccgatttatttagctggtcaatttattggggcctttttaggagcggttttagtgtttgttgtttattatgatcaatttaaatgcagcgaaaataaaactgacaagcttggggtattttgtacagtaccggctgtaagaaatagtttaattaatttcttatgtgaagtcattggaacgtttgtattggtatttggaattttaggcgtgggagcacaaaatctaaaaaatggaatgggtgcagtatttgtaggatttttgattttggtaataggtttgagtttaggtggtccaacaggatatgcaattaatccagctcgagacttagcgccaagaattgcacatttagtattacctataccgaacaaaggtgattcgaattggtcttatgcatggattccaataattgcaccagtagtaggtggtattatcggtgcagtatgctatatgctgcttttatagcatataaatataatatataattaaaagtatacaaggtgtattaaatataaaggataatgtttacttggaggaattcatgaatataagagaattattagaagaaaaccctgtaatagcagcagttaaaaatcaggaacaactacaattagcagtgaactctgaaatacaaattgtatttgttttatttggagacatagttagcataaaagaaataagtaagcttataaaatccaaaaacaaaataggaataattcatattgatttggtagaaggtctcactaataaagaggttgttataagatatattaaagaagagactgaatttgacggtataatcagtacaaagtcccaaattgtaaaaaatgctataaagcataatttaatagcggttcaaagagtttttatttttgatactatttcattaaataatgttaagagtcatattatatctgagtgtgatgcaatagaagtattgccgggagtaattccaaaggtgcttcaaattattgcaaagcattctaacaaaccagtagttgctgggggactaattgaaacaaaagaagaagtaattgaggctttaaaatatggagcaacatgtgtatcaacaaccaggaaagagatttgggagatgtaaatttttagaatattagaaagctggtgtatcatgaagaaatatataatagcattagatcaaggaactacaagttcaagagcaataatatttgaccatgaacaaaatatattagaaattagtcaaaaggaatttactcaaatctatccgagtaaaggatgggttgagcataatcctttagagatatggtcaagtcaatatggagttttgcaagaagtaatggcaaaagctaatataactcaagaaaatattgcagcaataggaattactaatcaaagagaaacaacaattgtttgggacaaaaatactggagaacctgtgtataatgctattgtatggcagtgtagaagaacagcagatatagtggaaggacttaagagagataaagagttttcagattatgtaaaagaaaatacaggattaatattagatgcatatttttcagcaacaaaaataaagtggatattagataatgtagagggtgcaagagaaaaagctgaaaaaggtgaattgctatttggtacagttgatacttggcttgtatggaagctaacaaatggcaaagtccatgtaaccgattacacaaatgcatctagaactatgctttataatataaaggaattaaaatgggatgaaagaattttaagaaaacttaatattccaagatcaatgctaccagaagttaaaaattcatccgaagtttatggatatacaaaccttggaggtaaaggtggtattagagtaccaatagcaggcatggcaggagatcaacaatgtgcattatttggtcaaacctgttttgaagaaggtagtgttaaaaatacttatggcacaggatgctttttacttatgaatacaggagaaaatataattcagagtaaaaatggactagtaacgacaattgcaattggattagaagggaaagttcaatatgcattagaaggttcagtgtttgttgggggggcagttattcagtggattagagatgaacttaagttagttagcgatgctgcggatacagagtattttgctaaaaaagtgaatgacaatggtggagtatatgtggtaccagcatttactggtcttggagctccatattgggatatgtatgctagaggagcaatttttggtctgacaagaggcgcaaataaaaaccatataattagagcggcacttgaagctattgcatatcagtcaagagatcttatagatgcaatgaaagaagattcgggatgtgaaattacaagaattaaagttgatggaggagctagtagaaataatttattaatgcagtttcaagcagacattacaggaacagaagttgtaagacctataataactgaaacaacagcacttggtgcagcttatttagccggacttgctgtaggcttttggaagtcaaaagaagaaattgccgagaagtggtctgtgagtgaggtgtatactccgaatttagatgaggatgagaaaataagattatataacggttggaagagagcagttgaaagagttcagggctgggaagaataaattttgtatttaatggacaaaaatacacttttgtgatataatgtatttaaaattgaaaataaatgcttagagaaaatagagtcaagcataaaactttggtgattacacctttgtttttgcttggcttttttatgtttaaattgttttaggtatacatagatattatgttaaaaatcagaacttttgtatatcaaaattttaagggttttataattggagggaggatttaatatgtatgatgttgcaataattggagcaggtgttattggatgctcaatatttagagagttaaccaaatatgatctaagggtagttgttttagaaaaagaaaaggatgtttctatgggaacaagcaaggcaaattctgcaatagttcatgctggatatgatcctgaagaaggtactttaatggcaaagtataatgtaaaaggaaatgagatgtttgaagagttatgcaaagaattaagtgtaccgtttaaaagaaatggatcattggtattagcctttgataaagaagatatgtttaaagtaaaacatctttatgaaaatggaagtaagttaggtgtaaaaggattaaagattttaaatagggatgaagtattaaaaatggaaccaaaccttaatgacaaaatagagggagcattatatgcaccaactggtggtatagttggtccgtttgaatatacaattgcattagcagaaaatggagttacaaatggtggaaaaataaaactaaagaaggaagttgtttcaataaaaaagagagatgtgtttaagattggaactgaagatggggaaacaattgaggcaaagtttgtaataaatgctgctggggtttatgcagataaaattcataatttagtttgcaaagagagttttaagatatctccaagaagtggagagtattttgtaatggataaaagccaaggaaatgttgtaaaacatacaatatttcaatgcccatcaaaattgggtaaaggagttttaataacaccaacagtacatggtaatttacttgtaggacctgatgctagggatgtggaggataaagaagacgttggaactgtttttgagggacttgactatgtaaaagaggcctctatgcgttctacaaaagaagtgaatttcagagagtctataagaaactttgcaggacttagagctaatccagatacaggagattttatagttgaagaaaacgatgaagttaaagggtttattgatgttgcagggatgaaatcaccaggattatcatcagcgccagctattgccgtagatgtggttaatatactgagttcagcgggatgtagtttgaaaaagaaagatgattttataaaagaaagagaacaaatacattttatggagttatcgcctgaaaaaaaagcagaattaataaagaaaaatgatatgtatggaaaaataatatgcagatgcgaaagtataacagaaggtgaaattgtagctgcaattaaaaggagttttggagtactttccttagatggaattaagagaagatgtagaccaggaatgggaaggtgccagggaggtttctgtggaccaagagtccaagaaataattgcaagggaatataatatcccactagaaaatgttgttttggaaaaggataattcttatattttagtaggaaaaactaaatagaaggtgaggtaacattatgaattatgaattaatagttgttggtggaggaccagcaggtcttgcagcagcatatgaggcatataacaatggaataaaaaatattttgattttagaaagagacaaggaactgggtggtatattaaatcaatgtattcacaatggttttggcctgcatacctttaaagaggagcttacgggacctgaatacgcagataggttcattgaaatggttaaagacactaatgttgaggttaaactcaatactatggtacttgagataacaaaggataaaaaagtttacgcaataaattcaaaagaggggtacatggaacttgaggctaaagcaataattctttctatggggtgtagggaaagaactagaggagcaattaatataccaggagatagaccagcaggtgtgtttacagcaggtgcagctcaaagatatattaatgtagaaggatacatgccaggaaaagaggttgttattttaggatcaggagatataggtcttataatggcgagaagaatgactcttgaaggagcaaaagttaaagctgttgttgagttatgtccatattcaaatggcttgaacagaaatatagtgcaatgcttaaacgattacaatataccactatatttgtcacacacggttacggatatcattggaaaagaaagacttgaaaaagtaataatagctaaagttgatgaaaacagaagaccaattaagggcacagaaattgaatttgatgcggatacactgttattatcagttggtctaattccagaaaatgagttatcatctaatgctggaatagagttagatagaagaacaaatggtctaagggtaactgaaagtatggaaacgtctatagatggaatatttgcctgtggtaatgtagtacatgttcatgatttagttgattttgtaacagaagaatcaaaacgtacaggagcttcagctgcaaagtatattaaaggtgaactaaaaaaagacaagtatgtaaatatagtgaatggaacaaatgttaattatacagttcctcaaaagcttaatgtagatgatgtcgaggataggttaactatatttatgagagtaaataatatatatcacaataaggtgttagtagttagaagcaaagaagaagttatagctaagtttaagagggctcatttagcaccatctgaaatggaaaaagtggttttaggcaaggcttttttagataaaattaagagtgatataacaatatcattggaggatggtgaataaaatggaaatagaattaatatgtatttgttgtcctaagggctgccatttaaaggttgatgataaaagcttaagggtagaaggaaataattgtcctagaggtgctgaatatggagttaacgaaattacaaatccagttagaaccataacttcaacagttaaagtagaaaaaggagaggcagtaatagttcctgtaaaaactaaagaaccaatacctaaaaaacttactatgggatgtatggaagagattaataaagctgtgataaatgcccctgtaaaaataggagatgtggtaattaaaaatgtacttggaacaggtatagatgttgttgcaactaagaatgtatcaggtatataaaaatagttaaaagaagcgtatatattgaagagaggtcagaaaaaaattctaacctcttttttaatgcctagtattaatttatatacgagtaaaatggacaatataaattatgtgtaattaagtgttggattataaagtaaaccgtgttttaaacaaatgttgaaatttgatatgcttttttatatatgttataattaaattacctttatagcttaaaattaagaattctaaatttatagcaattaatgttgaagcaatttcaagagtataatatttactgaaatatttagaaaattctgcgaaataagtttgctgtatttgtaatttaataatgcttatatagtatgattgaataaaataaagaggagatgttaaatgaaaaggaaatatagtcatgtttttacttttattaataaaattttattaatggtattgggttctgttattgcatcagtagggttagaaatatttttaatacctaataatataatagatggtggaataacgggtatatcaataattgcaaatcattttataaatcttccactaggaatatttatatttctactaaatctaccctttctaatcgttggttacaagcaaattggaaaaacttttgctttttcaacattattttcagttatatgtctgtcaattggtgtatcagttttacacccaattcctgggataacacacgatatactgttagcaactatatttggaggcattatactcggtgctggtgtaggattaattataagaaatggtggttcattagatggaactgaaattgttgctattatattagataaaagaatcgggttctctattggggaaatcgtaatgttttttaacttatttatattaggagcttcaggtatagtatttggatgggatagagcaatgtattctctaattgcttactttattgcttttaaaactatagatattacggttgaaggattgaatgaatcaaaatcagtaattgttgtatctgataaacataaagaaatttctagtgcattaactagtaggcttggaagaggagttacattactacatggggaaggtgcttataaaggtgatacaacaaatgttatatatgtggttgtatcaagactagaaattgctaaattaagaagtattgtacatgactttgatgaaaatgcattaatttctattgcaagtgttgatgttacaggaaaaatgtatggcaagaaggcaattcattaataattatgtattaatattaaaagaatagatacaattttattattccttagagcataataataaattaaatatttgattattggtggggctatagaagtagtgtaagaaatatgctaataatagccccatttaaattttttgtataagataatatcctctctagaaatacaaatttacttcatattaatagatttcaccttaactacgtccaacttctctagatcatgcattagtgaagtcaatcgttcattttcacctctaaaattcaaagttataagtccatgttccttttcgcctggatcatgggtcccaaatctagaaataatactatctccatatttagttaaaacttcttgaacttttgatgcggattttgttctctcgtctactaaaatacctactatacttaatttgtccaaaacaaacacctccttttaatattttttacacctaatgaaaaaatattctttaaatgatttattatcattaaattaatttggaagttttctacgatatttttagtatttggatcgaatataccatctgtactacataaaaaatttgacctaaaaccatagttttactaaaagactctgaatttgtgcaactagttctgctagtttttatggacaattttaagagtggcatgaaaaatgttaatttaaacagtaaaagcaaagataatgttaatttacaatataatatttaataagtaaaattgtactataattacctcttttcttaaaatatttttaggaaggagggtttaaaatgttgaaaattgatgatttagaaaaagagatacaagatcttagagaaaaacttacagaattaataatggaaaaagaaaatttacttgatccacaagttgttgctgcgagtaagatgctagattctattttgaataaatacagcgaaataattgatagcagtactaaaagatagtaaaagtagggaggcttgatgcctctctttctaataacttaaaatatgtttatctagaagttaattaaagaaaagataatctaatattattatgaatacagtcagctagttatttattatccttgtactttgacgttttttagcaatagatgtaatatgtatttaaaagtgggtttaatggtaatatttattacaataatttgatgtatattgtaaatatagtggattagctgtttcaatcttagtaattgaaggagaggagttaagatacggagaagatttttactcggagtttgatgaagcagttaataaattggtaaccccaatattaaaaaatgattttaggatattagagctgtataaatacaaaaagaaaagtaagcctataggatgcaatataactattttaaatggaagtaaagattcaataattcattgggatttacatgaatgggaaagacattctgcaaaaatacaagattaatcacatttgagggaaatcatttttttattaatgatgattataatagaactaggactatagatctaattaaagatactttattatagtttgtatgagaaataaaatttattagagataggaggataagtagtatacaataatagttaactacggattgcataaatgaatatagtaaaacaaaaagttgattttaacttaagtagtgaaaaatttgagtatttcctaaagtttgtgaatgaagaagaaaagaataaaatagtaagatatataagatatgaggattctttaagatcattgtatggaaaattgatacttaagaatatgttgagtttggacaaaatacaattagaatacaatgagtggggacaacccaggcttttaaataatagtaaggtgcattttaatatttcacattcaggggaatgggtagttgttgcagtggatgaaaaaccaataggtattgatatacagcaaatatataaaattgatttaacaatagcagaaagctctttttctaaaagagaaaataagtacatagcatcgttatcaaaagatgatagagtagatgcattttttatgttgtggacacttaaggaggcatttataaaagcaaaggggaagggattatatataccattaaactcatttaccatagatatttcaagtgttaaaccaatattatatagctgcaataacgaaagatgtgaattatcagttgaaagagtagagaaggattattttatggctgtatgtatattagacaaataagatattgtaatatttatttttgtttgagtaaagtagtcatattgcaaaaggtgaaaaaaggttgtatatttagagtgaatttttaaagtaataaaaaattttataacgaataaagttaagaaagcttctgtattagttttctaaatactttcataacataggataaacttttaatttaggaggaagcaaagtggaaacagtcaatattttaggtactggaagtgccatggttacaaaatgttataatacatgctttacactatcgaatggtgacgaacattttttagtagatacagggggaggaaatactatacttacaaaccttgaaaaattacatataggtatcgataaaattcataatgtatttatatcacatagacacaatgatcatataaccggaattatatggattataagagctgtagctcaaagaataattaatgggaaatatgatggggatttaaagatttattgctgcaaggaaaatattgaagtgataaacaccatatgtaaattacttttagaaaagaaattcactaaatacatgggaaatagaatagtattttctgaaatttatgatggatgcaggctaaaagtactagattgggatattgagttcttcgatataaaaagcacaaaacaacttcaatttggatttacaacagtacttaaaagtggaaagaagttgacatttttgggtgatgaaccgtatagagagaatttatacgagtatgctaataattcagattatattttccatgaggcattttgcttatattcagaaaaggacatatttaagccttatgaaaagcatcatgctacggttaaggatgcttgtgaaaatgcagataagctaagcgtaaaaaatataattctttaccacacagaagataaaaatatagaaaaaaggaaagaactatatataggtgagggaagtaagttttttaaaggaaatatcattgtcccagatgatttagaaaccattgaattaaagtagcatatagtgataaattaaaataacaagtcgaagtgacttgttattttacactcctgaataagaggagaaaccgccatctacaggaatgactacaccatttacaaagctagaagcctcttcgtttactaagaagagaagtgcaccaataagttcgtcagcttctccaaatctacccatcggggtagcatttaatattttatgagaacgtccagtgaagcttccatcaggattttttagtaaggcttcattttgttttgtcaaaaagaaacctggtgctatggcatttactcttatttgaacctttgataaatgaacagccagccacttagtaaagtttgatactgctgctttagcacctgagtatgcaggtatttttgtaagtggagtaaatgcattcattgatgaaatatttataatagtgcagcctcttttttctatcatatcctttgagaattcttgacttggaagtagtgttccaagaaaattcaagtcaaatacagattttattccgttttcttcaagatcaaaaaaggttataagatcttcattatcttcctttaaatcttcagcatataaatattctttggtggtggttcctgtaggattgtttccaccagctccatttataagtatgtcacagggacctaatttctccaatataatttcatgagcttttttaagagcagccttgtcaagaacatcagcctcaataccgatagcaattttaccgttacttacgatttcagcagcctttttttcagcactttctaactttctactaattatggctactttagcatcacactcagctaaggcattaacccatgagcttccaagtactccagtaccaccagttactactgctactttattttttaaattcacattaaaaggcagtttcattttatttatcctccttactgattttttcaagggtttcccatattccagtaatgtacatagctcctaatgcacgatcatataaaccgtagccaggtcttcctgtttcaccccaaatcattcttccgtgatcaggacgaatatatccatcaaatttatttttgtgaagtactttcataatttcaacaatatctaaagagccacaaggtgagtagtgggcactttcctcaaagcttccatcaaagagaagctttacatttctaacatgcataaaatgtatacgaccttggctagaatacttatctaccatttttacaacatcattaaagcttgcacaaccaagagagcctgtgcaaaaggtaaggccgttatatttgctgtctactatctttaagaatctgtctaagttttgttcatttgtaattattcgtggaagtccaaagatgttgtagggaggatcatctggatggattgccatttttacatcacattcttcagcaactggaatgatttgtttaaggaaatattctaagttgctccatagaacttcttggtctacattttggtatttttcaaatagggaagaaagctgatcttttgtatagctggaatcccatccgggaagagagagttctccagtaagagggtccattttcttaagttgattcttgtaataaacaagagtagtagaaccatcatctaaaaccttgtcaacctgagttcttgtccaatcaaatattggcataaaattatagcaaattactttaactccagcctttgaaaggtttcgtatattttctttgtagttttctatgtatttatctcttgttttaagtccgagttttatatcttcatgtacaggaacactttcgatgacatcaaaattcaagccataactttctacttcattttttaatttaagtatggcttctatactccatttttctcctacagggacatcataaattgcagttactatgctttttatacttggaatttgtctaatgtattgaagtttaacagcgtcgtcagcgccataccatctaaatgataaattcatattataaagcctccatttataaaagttaattcaattataaattcaattgtgcggaaaaaatatgttattattgctatataacttgcaaaaattgcttatataaaataatatatgaataaagtttgttaaaattgagttaagaggttgttatctgatgagaagaaaaatacataaatatatggaaagacaatacatgttatcagcagattatgaaatataccattattcaaataatgatattagaagtgtaagtattcatcatcacgacttttatgaattctatttttttatttctggagatgtaacatatttaatagagggaaaatcctactgtttaaactctggaaatataattttaataaattcaagggagcttcatcaagctattataaattcacagagggagaattatgaaagaattgtgctttggataagtagagtttttttacagaagctttcaagtaatgaaattgatctttcgctttgttttgaaagcaataaaaagaagaatgtgctaattgcggatttcgaacaggaaaagaatataagagctattcttaataaaataattagtttagaaaattataaagcaatggggtacgaactactttataaggcatatattacagagctaatggtgaatatatataatttggaatttagtggagatactcaattgagtgtggacactaaaaaaagtaaccttattgatgaaatcattgaatacattacttttaatatagaagaggatattactattgataaaatagctgaacaattttatcttagcaaatttcatctttcaagagaatttaaaaagtatacaggtactacaattcataggtatataattcaaaaaaagctaatacaagcgaaggaattaatactaaaagacatatcaatcacagatgtttataagaaatgtggatttggagattattctaatttctttagagcttttaagaatgaatataaaattaccccaaagcaattttatgaggctatgaaaaagtaaacagttttataatgttggacatgatataatttattgaaattgtcttgagcatatttaggtcacatctttgttttatatacattgtatacaagtaagatattttagtaacataaatatataagtaaggtattatactcaatcaggaaatacaaaaaaggcagtcgatttttctaggagctttttaaattaaggagtgttttatatggaaaaaaaatttaatttagaaaattatttaagttatggtgtacaaaatattgttaaaggtataataaagtcaactttgtccaatccaaaggaaagtttatttatggctaaatactctatagcaagtaaaaatgctataaaattgcgtgctgaagcggataaaataggagagcatgtaccaccgtttttaattgctagtattacaagtaaatgtaatcttcactgtaaggggtgctatgctagacacgttaattcatgtacagatgaaaaaacagtgaatcagcttacggatgaggattggagaagagtattttacgaggcaaaggatataggagtgggatttatattgttactaggtggagaaccacttatgcgtcctaatgttattaaaatagcaggtgaaattgaggatatactatttcctatatttacaaatggaactatgatagatgaaaaatacattaaattgtttcagaagtatcgaaatttgattcctatttttagtatagaaggcaatgagagtaatactgataaaagacgtggtacaggtatttatagcgaaataattaaaaaaatgaatgaagcttatgaaaataagattatatatggagcatccattacagttactaaagagaatattgaagaggtaacatctgaaaagtttttggataagctttatagtagaggctgtaagtctgtaatttatgttgagtatgttcctgtaagtgaaaaggaaaagaagatagctttggagggtaaagaaagggaatttttaaaagacaaattagtagaacttagatataagtatgaggatatcctttttatatcttttcctggagatgagaagagttcaggtggatgtctggctgcagggagaggtttttttcacataaacttcaatggaggggtggaaccatgcccgttttcaccatattctgacactaatttaaaagacttatccttaaaggaggccatgaattcacctttgtttaggaaattaagaaaggataatgtacttatggaggagcattcaggtggttgtgtattatttgaaaaggaagatatagtacaatcacttttacaaaagtaaagggtttagttttgcaatacaagtagcggtggatgatgaaacactaaataaattaaagtgaaaatctataaaaggtatttataaaagaccagagtgtaaaatatctggtcttttaactttgaataagacactactaaagatatgtaggaacaggttggttaacctcgttgtacatagatgatatcgtattttgttcattttgatcagctggagataaaggatagaagcccttttgaaccatccactgccatacatcatatgcatgattacaactcattgtaaatgcatccttcaaaaattgtcttatttctggattgctcatttccatagcactccaagcgtattctctgccagctctttttaaagttagaagatatgctgttgctatttctctgtcattcattttttgaacatcagttctaggagcaattggaggaaaagagttagctggtgatgatgtgaaattttgaagcattacatttagattagggacatttaatttttgatttgaaccttgagcctttttcacaaattcaaccttcatattatagtcctgtatatgagctggaaaatgactgtttaaaatattttttaaatcttgatcttgaaccatgtttctaaacatagccatattagttattgagtttacacaactgactattaattcgtgtaaatcgtgtaattcatgtgaagctaattgcatttaaattcctccctaattatataatttagtatttatccaatagatacttttcctctaaaagatacattttattcaagtgagttaaggtaactcaataaaaaaacagtatttttgtaaatcctgaatatttttgtaattgttgaatatatgatatttaatttttaaaaagtaacaaactttagaaaagtgaatatgatataactgtaagttaaaattcaggagggaaaagatatacgatgtacgaagataatgatatgtacgataatgatcccaacgtggactattcaagagggcaaaattgtattcctcaggaaactgtaataagaaatgtaagattagcagcagcatatgttcctttccaaaagatgtgtaatattcttccgccaatagagggtcttaaaagaggcactatttttatagaactttatagtccatatgggcgcaaaaaaagggacgaaaattatatagattaataaaggagatactcttatggaaatgaagaaaatgaaaaagatggataagatggaacttctaaagcaaattatggcagtagattttactataatagatttaagtttataccttaacactcatccaatggataaagaagctattgctaagcacaatgcttttgtagctcagtctcatatgcttaagggtcaatatcaaaaatattatggtatgttaacagctactaacagctgcagtccttatccttggcagtggataaaagaaccatggccttgggaatatgatgcgaattttaggctttagaattagaaagaggagagatagtaaatgtggatttatgaaaaaaaactagagcatccagtaaaaatcaaaaatcctaatgcacaattagcaaaagtaatcataacccaatacggtggtcctgatggggaattggctgcatctattagatacttaagccagagattttctatggttacaccacaagcaattgcaactttaaatgacattggtactgaggaattagctcatcttgaaattgtaggatcaatagttcgtcaattatctagaggacttagtgttgaggaactgaaaaaaagtggattagatgcttactttgcagatcacgattctgctatatatccagcaagtgctgcaggaaatccatttactgctgcatatatacaatctaaaggcgatcctataacagatctttatgaagatttagcagcagagcaaaaggcaagatccacctatgaatatttgattacgctttgtgatgatccagatgtaattgaaccactcaaattcttaagggaaagagaagttgttcactttcaaagatttggagaagccttaagaatagttcaagattatcttaatgaaccaaagcttgctgtaattccaaaaacggattgtatgaaaaaataaatcttatatttaaaggccttttatgtgattaaacataaaaggccttatttatacagtttaaatttattttgctcctactgaacttcctttggcattttgttttgattttggaatccaaaacttttctatttcttccagacttttgttttttgtctcaggaaccttagttgtaactactaagaagcatattacgttaattccacagaatatccaaaaagtatatgctccaccaatgccgtttaaaagcattggagtaaattgtccaattgcccagttagcaccccaaaggaagatagttgctatgcctgttgcacgagctctcaaatggttagggaatatttcaggaatcataatccaaggtataggtcccattgaaatacagaaggaaacaacaaaacatattatgaagattaatattacaaaaccatttgataattttatatagaaagaagttccgattaatagcatgaatactgccatagcagcagatcctatttccattaattttttacgtccaagtttatctattaaaaacattgctaaaattgttgagaaaacttcaacaacaccaataacactggttgcaagaaagctagaattatttttgaaacctatcatttgaaatatttcaggaccataataagtaattgaattcattccaatagcttgattaaatatagctaagaaaataccaattaataaagctcttctaagaccaggttgaagaagttgacctaatgaagaatcgttttcggtagcaagagacttagaaatggaatctagttcctgctttgcaatttcagcaccgttgattttggttaaaacagcagcagccttttttatatttcctgatttaacaagaaaacgaggactttctggaacaaagaataatgtaattaagaatactatggctggaacagttccacaagctaacatatatctccaacctgttgaaactctccaggtttcgctgcccatatttacaattcccaagtttacaaagaaggtaattgaaataccaagtatggtaaatagttggtaaagtgaggacagcctaccgcgaatagatggcggcgcacattcagttatatatgttacagatagggcagaagccattcctataccaagacctcctactatacgagcaaaaatgagcataaatgcagaagtggatatagaagatattacagcggaaatagcaaatagtgcagcagcaagcattaaaacttttctcctaccaatagcatcgcccaagaaaccagaaaaaccaacgcctagtacaccaccgaccatgatacttgaaataacaaagccctgcatagcaggtgaaagattataaagcttctttaaaaagcctatagcaccagagattactgcagtgtcgtatccatataataagccaccaagtccagcagcacaagaaattagaactatgaataataaagaatgcttatgtgaattgttttcccccatgaaaactcctccttaagatttatatatgtggaaatcaaagagaaatctaagttacaaatgtaaacatatcaattatatataacgttttcatatatgacttataatcatttgatttcctaagggtaatatattttatgaaagcgattacctatataaatcataatatttatgtgtataaatgtcaagaaaaatttggattttatacgtatgaattgtaaatgaaaggaataggaaatcccttgtaggcaaggcaagggactaaatataaattatttcaattttaaggttgaatctctaataattagtttaggttcataaacaatggaatcactagtttcaaaatgattactgttatttattaaatttataattaatttggcagcatctttacccatttgttctttaggatgagttatggtggttaatttaggctgcataattactgcaagattggaatcgtcaaagccaactatagatagttcttcaggaactttaatatttaatttattagcaattgttagaactatataggctatttcatcattgtagcaaaaaactccactaggctttttttctgattttagtgcatactctattttctcaggaagggatgaagatatttcttctgagagataagttaaaatttgtccaggtgatggtggaatattattttcctgacattctgaaataaatccattcattctgtttatgccttgtgaatcatcgaccttaaatatacccatcagttttctgtgacctaaagatataagatggtttgttgccagttttccgcctttaaaatcatctacttttaagctaggagtgttgatctccggatatgaggcatttagggttacaacaggaatatttttggatattatattgtttaaatatccaatatttgggctttggtacgcacttttagtgggttctaaaatgagaccatctattttgtgggctaataagttttttaaattactattttcaaacataacgttgttattagttgaagatagtaaaagtgagtaggattcagaataaagcgtgtcctccatgcccttaattatgtcagggaaaatataattagatatatgggttgttagtacagctacatttttagtattctttagatattctctattttctgtccaatcagagatatatattccactaccttgaattctatatacatattgcatggctacaagatcacctatagcttttcttatggtatgtctgctcacactaaacatttccataagctcagattcagtggggattttttcatggggtttatattttcctttaacagcccaatctataattttttcttctacttcttcatatttgtgcttcatttttttctcctataaaataattgttttttataggaatattatatcaaaaatatgtttatttcacaacaatattgatacgtataaattttaataactgtaatattaatttataaattagagtatattaatttataaagttagaattgtaggtagcattataaagacaattacttttaaaagaagttatacttttaagaatttatacgtatgaaaataaaatgtgttgacatttataagtacaaattatattatataagcataatcgttttctaaaaataatgcataatagtaagttaagttatggaagatcatattttgtagttgttactgatttaaattgttagaaaaagaaaacttctaggttttatttttatcaattttatattatgtttttggtaaacgttttacttgcaaattagtataaaagcaattcgagattactgaaaaataacgtatgtaatgagtaattaaaaaataaaagttagggaggagtattttatgctagaagctttaaaacaagaagtattagaagcaaatcttatgttgcctaagtatgggttagttgtattcacctgggggaatgttagcggtattgatagagaaaaaggtcttatagtcataaaaccaagtggagttgagtatgatcaaatgaaagctagtgatatggtagttgtggatctaaatgggaaggttgtagaaggtgacttaaatccttctagtgatactccaactcatatagtgctatataaagagttttcagatattaagggaattgttcatacacattcaccttgggctacatcttttgcacaagcaggagtttctattccagctgcaggtacaacccatggagattatttttatggtaatattcctgtaacttcaagaatgaccaaagaggaaatagctacagattatgaaaaacaaacaggagatgttatagtaagaacctttagaaaagagaatattaacccaaatgatgttccagctgttcttgtgaatgatcatgctccttttacctggggaactgaccctaagaatgcagtgcataattctgttgtattagaagaggttgctaaaatgacatatcattctttacagcttaatccacataacattgaaatgagtcaggatttgttagataagcattttaaaagaaaacatggtgcaaatgcatattatggtcaaaaaacaaagtaagaaaagaggatataaaaatgctaaagaataaaaaattagaattttggtttgtagtaggtagtcagaatttatacggtgaagaagcattaaatgcagtaaaaaaagattctaaagaaattgtggattctttaaatgaaagtggaaaattaccatatcctattgtatttaaaactctagctacatcagcagatgaaattaagaatatagttaaagaaataaattatagagatgaagtagcaggtgttattacttggatgcatacattttctcctgctaaaatgtggatagcaggaacaaagcttttacaaaaaccactattgcatctagcaacacaatttaacgaaaatattccttggaaaactattgatatggattatatgaatttacatcaaagtgcacatggtgatagggaatatggatttattaatgctagattaaacaaaaataacaaagttgttgtaggatattggaaggataatcaagttcaaaaggaaattgcagagtggatgcaggttgcttatgggtacgttgcaagtgaaaatataaaggttgcaagatttggggataacatgcgtaatgttgccgtaacagaaggagataaagtagaagcccaaattcaatttggatggacagttgattattttgctattggtgatttagtggctgaaatgaacaaagtttcacaaaaagatatagatgctacttatgaagagtttaaggatatttatatattagatattggagataatgaccctgaattttatgagaatcatgtaaaagaacaaattaagatagagataggtttacgtaattttctagaggcaggtaattatacagcatttacaacaaactttgaggatctttatggaatgaagcaattacctggacttgcagttcaacgtttaaatgctgaaggttatggttttgcaggtgaaggcgattggaaaacagcagcacttaatcgtttatttaaaattatgactgacaacaagaaaactggatttatggaagactatacttatgagctaagtgctggaaatgaaagaattttgggagcacatatgctagaagttgatccaacacttgcagctagtaaaccaagagttgtagttaaaccacttggaattggagataaggaagcaccagcacgtttaatatttgatggagttgtaggtgatggagtagttgtatctatgcttgatttagggacacactatcgtttacttattaacgaagtaaaggcagttaaacctactgaggatgctcctaatttacctgtagcaaagctagtatggcagccacaaccaaactttaaagatgcagttaaagcatggatttatgctggaggtggacatcatactgttgcaaccttagaattaacagttgagcaagtttatgactggagtcgtatggttggtttagaaacaatagttattgatcataataccaatttaagagatattataaaagagacttcaagataaattgtatttttagagaataaaagtaacaactatgaagttaaaggactaattaacttcatagttgtcaaaatataattaaatttatacgtacaaattactaaaaagtcattgacatatgcgtacaaatattttactatacgtatagtacatataatatttgttttaagacatttaattaaaaattagtagaaaatctagaaatataccatagaatcacactagatgaattcataattaatgattataaatttaggaggaatattatgcaaagtataataggaaaacataaggatgaaggaaaaatcacaccggagtatctaaagaaaattgatgcatattggcgtgcagctaattttatatctgtaggtcaattgtatttgctagacaatccattgcttagagaacctttaaaaccagaacatctaaaaagaaaagttgttggtcactggggtactattcctggtcaaaactttatttatgctcatcttaaccgtgttattaaaaaatatgatttagatatgatttatgtttctggtccaggtcatggtggacaagtaatggtgtccaattcttatctagatggaacctatagtgaagtttatccaaatgttagtcgtgatttgaatggcttaaaaaagctatgtaaacaattctcttttccaggtggaatttctagccatatggctcctgaaacaccgggttcaataaatgaagggggagaactaggctattctttagcacattcttttggtgctgtttttgataaccctgatttgattactgcttgtgttgttggagacggagaggcagaaacaggacctcttgcaacatcttggcaagcaaataaatttttaaatccagttactgatggagcagtgcttcctattttacatttaaatggatacaaaattagtaaccctactgtgttgtctcgtattcctaaggatgaacttgagaaattctttgaaggaaacggatggaagccttattttgtagaaggtgaagatcctgaaacaatgcataaattaatggcagaaacattagatatagtaacagaagaaattcttaatattcagaaaaatgctcgtgaaaataacgattgttcacgaccaaagtggccaatgattgtattgcgtacaccaaagggatggacaggtccaaaatttgtagatggtgttccaaatgaaggatctttccgtgcacaccaagtaccgcttgcagtagatagatatcatacagaaaacttagatcaattagaagagtggcttaagagttataaaccagaagaattatttgacgaaaactatagactaataccggaacttgaagaattaactccaaagggaaataagagaatggcggctaatttgcatgctaatggtggtttattattacgtgaactacgtacacctgattttcgtgattatgctgtagatgttcctactccagggagcacagttaagcaggatatgattgaacttggaaaatatgtgcgtgatgttgttaaattaaacgaagatactcgtaatttccgtatttttggaccggatgaaactatgtctaatagattatgggcagtttttgaaggtacgaaacgtcaatggttatcagaaattaaagagccaaatgatgaattcttatcgaatgatggacgtattgttgattcaatgctaagcgaacatttatgtgaaggttggttagagggttatcttttaacaggacgtcatggtttctttgcaagttatgaagccttccttcgtattgttgattctatgattactcagcatggtaagtggttaaaggtaacatcacagctaccatggagaaaagatattgcttctttaaatttaatagcaacatctaatgtatggcagcaggatcataatggatatactcatcaagatccaggtttattaggacatattgtggataaaaaacctgaaatagttagagcatatttaccagcagatgccaataccttattagccgtatttgataaatgccttcatactaaacacaagattaatttattagtaacatcaaaacatccaagacaacagtggttaacaatggatcaagcagttaagcatgtagagcaaggaataagcatttgggattgggcaagtaatgacaaaggacaagaacctgatgtagttatagcttcctgtggagatactccaacattagaggctttggcagctgttacaatccttcatgaacatttaccagaattaaaagttcgttttgtaaatgtagtggatatgatgaaattattacctgaaaatgagcatcctcatggcttaagcgataaggattataatgccttatttacaacagataagcctgtaatatttgcattccatggatttgcacatttaataaatcaattaacatatcatcgtgaaaatagaaatttacatgtacatggttatatggaagagggaactattacaacaccatttgatatgcgtgttcaaaataaattagatcgttttaatcttgtaaaagatgtagtagagaatttacctcagcttggaaatcgtggagcacatcttgttcagttaatgaatgataaattagtagaacataaccaatacattcgtgaggttggagaagatttgccagaaataactaattggcagtggcatgtataaacattaataaattaactgttatactaagaaattagtataacagttaactataaaaaatactaaaaaaataaaataggtacgtaccatttttaaaaaatagttgacatgtacgtacaaaagtagtatatttaatataaagagttacttaaatatttcgggaaggggttttaaaattgattatagatgaaaaaagagtacaagaaatcaaaaacggtgaaacatcacttggaatagaatttggttctactcgaattaaagctgtccttattgcaaacgatttctccatattagctagcggaagctttgaatgggagacaagtttagaaaatggggtttggacatattcaatagatgaaatttggaaagggttacaatacagttaccaaaagcttttcgcagaggtaaaggaaaaatatggagtagtgctttctaagattggttcaattggattttcagcaatgatgcacggatatatggcttttgataataagggagagcttctagttccattcagaacttggcgtaatacaatgacagaagaagctgctaaaaagttaacagatttatttaagtttaatattcctgaaagatggagtatagctcatttatatcaagctattcttcgtaatgaaccccatgttgagaaaattgattttttaactactttagcaggctacattcattggcagctaacaggtgaaaaggttttaggtattggtgatgcttcaggaatgttcccaattgatacacaaacacataactatgataaaaacatgttagaaacctttaagaatttaccagaggttaaaaaacattcgttagatttagaaaaacttctaccaaaggtgttactagcaggagagaatgctggagtattaaccttagagggagcaaaaaaacttgatgtaagtggaaatcttcagccgggtattccattgtgtccaccagagggagatgctggtaccggtatggttgctacaaattcagtggcaccgcgcacaggaaatgtttcagcaggcacatcaatttttgctatggttgttcttgaaaaacctcttaatagggttcatcctgaaatagatatagtaacaacaccttcaggcgatttagttgcaatggttcatgcaaataatggttgctcagatttagaggcttgggttaatatttttcagcaatttactgaggctataaatgtagatatgagaaaagatcttctttatatggcactatatactcaagcttttcaaggagatcctgattgtggtggagttcttgcttacaattattttgcaggtgaaaacatcacaggtgtttcagaaggtagacctatggttgtaaggaaggcaaaaagtaattttaatttgccaaactttatgagagcacatttatttacttctttaggtgcattaaaaattggtatggatatattattaaaggatgaagctgttaaacttgataaattacttggtcatggtggactgtttaagacacctattgtcggccaagcagctgtggctggtgcagtaaatgctcctgtgtcagttatggaaacagcaggagaaggtggagcatggggaatcgctttattagctagctatttaagaagtaaggaaaatgattctacattaccagaattcttatcaaaaaatgtttttgcaggttatgtagcagaagaagtacaacctgatccaaaagacgttaaaggttttgaggagtttattgaaagatataaaaagggaattgctatagaacaagcagctgtagagcatttaatctaaaagtaaaatttagaagattatcagattaaatcttcattactttttaaaattaatagagatttaatctgattgttaaaaatatatactaagtaattgccgaaaggattgatgttattagaaagtagtataaaaatttatcattaatgaaatcgtttaaaaacaattgtgatagtatttaattaacagattgaggaggaatataaaatgaataaaaaaatatctccagcactaatttatttctttggagccttcggtggatttatgtttggatatgatattggaataattaatggtgctttacctggaattaatgcaacttggcacgtaagttcttggttagaaggatttatcacttctggattgtttgttggagctatgataggagcctcattaatggcttcactagcagataggtttggtcgtcgtagaatgattatgtggagtgcaattgtgtttgcacttggtgcattaggttctgccgtttctactagtactaatcttttaatcggtgctcgtgttattttaggagtagctgtaggtggagcttctgctttagttccaatgtatatgggagaaattagccctgctgaaacacgtggaaaactatctggtttaaatcaattaatgataactgttggaatgcttttctcatatggtgtaaattttgcgtttgctggtgcatttgaaggatggcgttggatgcttggaggagctatggtacctgcaatggtactattaattggaacatttatacttccagagtcaccaagatttttagctagaataggaaagacagaattagcaaaacaagtacttcagactttacgttcaaaggaagaggcagaaactgaatatcaagagattattaattcaaaacatactgaaacaggttcttttggagatttatttgcaaaacaggctttgccagctgtaattgcaggctgtgggttaacacttcttcaacaaattcaaggtgcaaacactattttctactattcatcacaaattttatccaatgtttttggatcagcaaatggtggaactattagtactgttggaattggtgtggttctagtattagcaactattgtaactttattggttgtagacaaattcaaacgtcgtacattatttatgactggttctattggaatgggcgcatctctattattagttggattaatttatccatactctgaagctaaacatgcgtgggcaacttggttagtattcttcttcatatgtttatacgttgttttctatgcatactcttgggcagctactacatggattgttgttggagaattattcccaagtaatgttagaggacttgcaacaggtattgcatcagcagtaaactggtttggtaacattttagttgctttattcttcccagtattacttgaaactgtaggtttatctgtaatcttcttcggttttgctgcaatttgtatcataggatttttatttgcaaaatatgttctttatgaaacaaaaggaaaatctttagaagaaattgagacatatttgtacaatcgttctattggaaaagttagaggattaaatgagtagtttataaatgttttttagaataaataaaaaatagataaggggagatttatcatgttagaaaataaaaagatggaattttggtttgtagtaggaagtcaacatttatatggtgaagaggctttaaaagaagtaagaaaaaattctgagacaattgtagatgaattaaataaaagtgctaatcttccatataaaataatatttaaagatttagcaacttctgctgataaaataaaggaaataatgaaggaagttaactatagagatgaagtagcaggagttataacttggatgcatacgttttctccagctaaaatgtggatagcaggtacaaagatattacaaaaacctttacttcattttgcaactcaatataatgaaaatattccatggaaaacaatagatatggattatatgaacttacatcaaagtgctcatggagatagagagtatggatttattaatgcaagacttaaaaagcataataaagttgttgtaggatattggaaggataaagaagttcaaaaacaagtttcagattggatgaaggttgctgcaggatatattgcaagtgaaagcataaaagttgcacgttttggtgataacatgcgtaatgttgcagttacagagggagataaagtagaagctcaaatacaattcggatggacagtagattactttggtataggtgatttagttgctgaaatggacaaggtaagccaagatgaaataaataaaacttatgaagaatttaaagatttatatattttagatccaggtgaaaatgatcctgctttctatgagaaacaagttaaagaacaaatcaaaattgaaataggattaagaaggttcttagaaaaaggaaattataatgcatttacaacaaactttgaagatctttatggaatgaaacagttacctggacttgcagtacaacgtttaaatgctgaaggctatggctttgcaggcgaaggagactggaaaactgcagctttagatagattattaaaggttatgactaataatactgctacaggttttatggaagattacacatatgaacttagtcgtggaaatgagaaggcattaggagctcatatgcttgaagttgacccaacttttgcttcagataaaccaaaggttattgttaaaccactaggaattggagataaagaagatccagcacgtttaatctttaatggttcaacaggaaaaggtgtagcagtttcaatgcttgatttaggaacacattatcgtttaataataaacggacttacagcagtgaaaccagatgaagacatgccaaacctaccagttgctaaaatggtatggaaaccagaaccaaacttcattgaaggagttaaatcttggatttatgcaggtggcggacatcatacagtggtttcactagaattaacagtagaacaggtttatgattggagtcgtatggtaggcttggaagctgtaataatagataaggatactaaattaagagatataatagaaaagacaacaaaataaaaattatattttaaaagaatatcaataaaattcaacacataattaggattttagagcatatataactgtttttaaatgtaacttagagtaattaaagaagctttgttttgaataagtatataaagaacacttatttaaaacaaagctaaaaaaaatataggaggcataagcaatgaaactttttatagatacagctaatgtagaggagataaaagaagtaaacgatatgggggttatatgtggagtaacaactaatccttcccttgtagcaaaagaaggaagagattttaatgaagtaatacgtgaaataacatcaatagtagatggacctataagtggagaagtaatagcattagacgctgaaggaatgataaaagaaggaagagaaatagccaaaattcataaaaacatggtagtaaagataccaatgacggaggaaggtttaaaagctgtaaaggtattatcaagtgaggggataaagacaaatgtaactcttattttttcagcaggtcaagctcttttagcagctagagcaggagctacctttgttagtcctttcttaggaaggcttgatgatataggtgccgattctataggattaatagaatcaattgtaaatatatttgatatacatgatataagaacagaaataatagcagctagtataagaagtccaaaacatgttattgattcagcagaggcaggagcgcatataggaacagttccatacaaggttttgaaacaattaataaaacatcctttaacagatatcggaatagaaagatttatgaaggattggaaagaggcttttaataaataataaaggagaatacttagatgaatatagataatttagctataaatactataagaattctttctgcagaagctatacaaaaggcaaagtctggtcatcctggattgcctatggggtgtgcaccaatggcatatacactttggagcagacatttaaaacataatcctaataattccaaatggaaagatagagatagattcgtgctttcagcaggacatggttctatgctcttatattcgttacttaatatatttggttatgatgtaagtgttgaggaaataaaaaactttagacaattcaaaagtaagactccaggacatcctgagtatagatggacagatggagtagaaacaacaacaggacctttaggacaaggaatatgcaatgctgtgggaatggcaatagcggaaacttatctagcaaataaatttaataaggaaagttacaatattgtagaccattatacctatgcgcttgtaggtgacggctgtcttatggaaggaatatcaggagaggcaagttctcttgcaggtacattaggtcttggaaaattaatagttttatatgattcaaataacatatcaatagaaggaagtacagacattgcctttagagaaaacgtagctttaagatacgaagcatacggatggcaggttatcaaagtggatgatggtactaatttagaaaaaatagatttagccataaaggaagctaaggtagaaaaaaataaacctaccataataatagtaaaaaatgttataggatatggctgtccatcaaaacagggtaaagcagctgctcatggagagcctttgggagaagaaaatttaaagctcacaaaggaaaatttaaattggaattatgaaccttttactgttccggaagaagtaagagcatacactaaagagtttaaagtaagggctcaaagacaagaggataagtggaacagtatgtttgaagaatataaaaaggaatatccaaagctttataaagagtgggaagtttggtttagtgaaaaaactccaatgaagctattagataatggagaattttggaagtttgataaaaacatggctacaagacagtcctcaggggttcttattaatagacttgcaaaacttattcctaacttaataggaggctctgctgatttagcaccatcaaacaagacacatatggatgacagaggagatttttcagctgaaaacagaagtggctctaatatgcattttggagttagagaacatgctatggcagctattgcaaatggaatgtacttgcatggtggacttaaggtatttgtagcaaccttctttgtatttagtgattacatgaaaggagctatgagactttcttctataatgaagcttccaatagtttatgttttaacgcatgacagtattggtgtaggtgaagatgggccaactcatgaacctattgagcaattggcagccttaaggtctatgcctaatatgactgtgtttaggccagcggattctaatgaaactgcagcagcctggtatagtgcattaaatactaaaaatggaccaacagccttagttttaacaagacaagcacttcctttatatgattcttcaggaaaaaatgctttaaagggaggatacattctaaaggattctaaaaataaagaaaatccagatgtaatacttatggcttcaggttctgaagttgagcttatattaaatgcagcaaaagagcttcaaaatgaaaatatagatgcaagagttgtaagtatgccttcctttgaagtatttgaagagcaaagtgaagactataaaaattctatattacctagaaatataagagccagagttgcagttgaagctgcatcaccttttgggtggcataaatatgttggacttgatggcgaagtgattgctatggagagttttggtgcatcaggtaaatcagatatattatttaaagagtttggttttactgtggagaatgtagttgaaaaagtaaaaaatgttttgaaaaatttaaaataaaagggtggggtaaatgtgattgaaaagagtatttatggacaccttgatggaagacaaatttataaatatacaataagcaataaaaatggaatgaagttctcctgcatttcgcatggagctactttgacagaaatatatgctctagataaaaataaaaaaccagtaaatgtattgcttgagtttgataaatcggattactatgttaaagatacaaaaatgtttgcaggtgctgcaattggacgagtagcaggacgtattgataaaggtgagtttgaaataaagggaagaaagtataagattgaacctaatgaaggagaaaatgttcttcatgggggtaaatatggtttcaattcatatatatgggaaagtgaaagctctgaaaaagacaatagtgtaactttttacagaatgattaaggaaggaaagggtggatttttaggagaacttaaggctaaaataacctattctttaaatgataataatgatttaaatatccattttagcgggttatcagatgaagatactctatttaatccaactgttcactcctattttaacttaagtggaaacatagataatttgcttaaaaaccatacacttaaaatcaatgcagattatgttgcagaaactagaagtgataatgtgcctaccggggagcttaaaaaagttaaggaaactccttttgacttcctagaacatagagatttaatgactgcaatagaggatgtaaagaaaaaatgtaatttagaaggaattgatcacccatttaagctaaaatcaaaaaacgcagcaacattaattagcaatgatacgggcataaagctttgtatagaatcggaacgtaatgcactaattgtctatactttaaattttccatgtgaggattttgaagttaatgggaagaaaattcctcagtatggtgcagttgcattagaacctcaaactcttccagatgcaattcatcataagaattttggaaatatagtattaccaaagggagaagaaaaaagttataatataaaatatcattttggattaatatccaaagaataaattatccatataaaaatagcttttcgtaaaaaataccctataagataagtgatttaataaaagcttatctcatagggtatttttattataatgtagaggaatgtttatcattagtgggatagtaaagcaggataaaggatggcaaccgaaaaggtattaattaagaaaagtaataataaaaatttctaaatattatacgtgaggttaaacttgatattactgcattatcttatgctgaaagcaaagatgatattattttaatgtaagataaacttgagggagcattaggttacgcacctaatagtatgtataagattgaaactatgaaaggtattgacaatttgaattataatacctgtaagaaaatgtttagctttaaatgtaggaatatcaagacttttatattattagaatttagttttagacaaatgtaagaaaagaaattgttattaaagaaaaatcttctcaaaatacctatgaaaatgcgtataaatcaaagaattagttgagagctcaaatataaatttaagaaaggctatcgtatgttgtcagtcatatcatgcacgtcgtgtgctaatgacatataggtgggtttattctaatactcaattttatatttgttctgttgacactcgaggaataaccaaagataattggtttacattcgagtatggtataaaccgagtaatgagagaattagcacgatgtggacattattttcctagtatgataaaagaagtatatgaaaaaaatttaaggataaataaaaatattatcatgtatgaaaactataaatgatgaaactttcgaagaattagttaaataaattgatgattatatcatttatcataatagttataggtttcaatgaaacttaaaaaagatgactcctgttttaggcagaagccatcttcataacactgtctagaccttttttaattgtctgtgacaaaggttatattttaatgtatattaaaaaactatttttatatagattaatttttattttgcactttgttttcctaaatacttatccgcgtcattagggacaactaattcataaggcacaaaaatctttttatttattttctctcctttaactagtttataggctgcctttatagcttctgaaccttggccagctgcattttggaataccgtgaccttaaggctaccttcttttaaaagctttaaggcatcaggggtagcatctatacctccaacgaaaacattatttattaagttattttcttttagtgccatgattgcaccaattgccatttcgtcattattggctagaatagcatcaaatttagtgccatttttaatccagttttctgttatttgcattccgagggtccttttccaatcaccatattgctcgtctattatttttatttcgggataattttgaagaacctgtttaaaaccctccgttcttttaatggcagtttcatgatttggctcaccttttagaataacaacattaccttttccgttaagctgctttacagcatattcagcttccataataccagaagttatggaatcagaacctacatatgctgcagcatcatcctggttttttaaaaaattattaacacttattattggaatacctgaatcatttgctatttgtgtataatcgctagacagaagagtatcaacaggcaaaactagtattgcattgcatttttgagctactaagtttgaaatttgagatttttgtcttgcaggatcacctttagcatttacaacaactaaatcggtgtcaggtaaatttttagcctcgttttccatggcatttattattttgtttctaaaaacatcatctgaagctggaatagataatccaatcctgtattttttactcttataaactattgattttttttgagcacatgctgtaagtaaaaagcaggtagctgcaaatataattaaaatacggctagtctttttcatggaagttccccctaaattttaaacttgtttatcaaattttttagctcgttagacatttgagataaaacagtggtggtggagaatatttcttcaacactagcggtttgttcttcaactgcagcagcaacatcgtggcttgattcggaagagcttttagcaattctttctatatcaatactcattttttctacagtagagatttcttttacaataccttctatttctaaagttatttcttgcatttgtttatcaacgttactgctggtatttagtatttcactaaaagcttctcttgctgcttctgctactgttgtgctttccttaatttcttgtacactagttgacatactctcgtataattcatttgatttttgctgtatatcttgtagcatgcttgttatttcgactgtagcattttgtgaatcttcagctagcttttttacttcctcagctacaactgcaaagcctttaccgttttctccagctcttgctgcttcaatagctgaatttaaagctaatagattagtttgcgatgctatttctgtaatagcatctacgactttttttatttcgttagaccttttgtttaaaagttctgcagtgttttgcacaggaatcaccttattttctattacttttatttgctctattacttttttcaatttttcatttcctaaaacagctgcgtttgttgcagcatcagatgtatttaaaaccttatgagcattatcactgattctcttatttgcttcgaataaatcagttatcacagaaacagttttttcagcttgatctgcttgagttaaggctccttcagatacaccttgaactgatactgcaatttgctcaagtgcttttgagctttgctctgtatttgtctgaagattatacgcagcatctgtaacattgctgctttcagtgttgattttatttatcaaggatctaagatttctgctcattttgttaaaagattcggcaagtacacctagttcatcagaagagtttatatgtatatcagctaatgctagattattttcagctatggaggttgcataagttaccaatttctttataatgtttactatgttatttattaagatagtagcgacagcaaagcttaaaatgctaattgatattatgagtattataattaatatacccataaagcttgcggtcttaagtagggctattttttcggttttttgatcagtaagttggtttgtaactaaattctgtatactgtcatttgaggaacttaaggtttgagtgattattttaaagtttttcatagcctgctctgtatctccagatttattagagttaattaaattattaagattttcttcataagtggacattattctttccataacatctacagatttcatactatttaagcttgtagtattgtccttaataaatttaatattgctttttatcttatctaaattactgtaagcagcttttttggacttttcgtctttatttagtacaaccttgttgacttcagagatagaattatcagctaaggcgaaaatttcattggatttaacagttacctcaatcatggtatctaatctgttcattaaactcttcatgattgcaaaagtacctatgctaagaaaagtcataggaataataatgcctacaagaatagttataagttttactcttaagctgcgtctagctttattactgtcagtattggctctattcataataaaatcctcctaatataaaaataaatagattagttaattatagatttatagttatggattttatcgatagataattaaatgtcttaatgctataaaatatggtgtgtaaggggaaaatagtatcatgaggataagaaatgcattaacaataaagcgcccttagattattgtctatctctaagagcgcttatgtataaaatttaatattattttttaataatttccttaatgtgagttgcaattatatcagctgtagttccaacaactatttgaaagttcttgtcatctagcttcataattcctgtagctcctaattttttcaatttaggttcatcaaccttgcttccgtcttttaccgtaagtcttattctagtaacgcatgcatctaatgattgaatgttatttttattacctatagcttctaatattccaacggccttttcttcaagagttgaattctttgaaggtgaagacttaatttttggagtgttttcaggttcttcatctaaatcatctaaatcatctaaatcatctaaatcatctaagtcatctaagtcatccattctaccaggagttggtagattgaatttttttattgtaaataagaataagaagtaatagattattgcgtataatataccaatcactataagtaatattggttttgtggatatattaaaattcattatataatctacaaatccagcggagaaggtaaatcctgattttattccaagtgctgaggttattgccatagaaagtcctgtaagaacagcatgtacaacatatagaactggtgctaagaacataaatagaaactcaattggttcagttacacctgtaagaaaagcagtaaaagctattccaagaagcataccagaaaccttttttctattttcttttttagcagctgaaatcattgctaaacatgcagctggaagtgcaaacatcataataggaaagaatccagtcatgtatgttccagcagttttatctaatgcaaagaatctatgtaaatctccagttactatttttcctgaagctgatttgaaggttccaaattgaaaccagaataatgtattcaaaacatggtgaagtccaattggtataagtaatctgtttaaaagtccataaataaaagaaccaacaacgcctgcatgtgatacgctgtttccaaaagcgtttataacattttgaatagcaggccaaactaatccggaaattagtcctaatactagagaacatagtgatgttagtattggaacaagacgtcttccaccgaagaagcccaagaaatctggaagtctagtactcttgtatttattgtaaagattaccagctaaaatacctactattataccgccaagtactcccatatcaatgtgcttgttaaatgatgtagcgacatttgttaaaacgaaatatccaactgctgcagatagtcctgcaacaccattattttcttcagcaaaacccactgcaattccaattgcaaatatcattgctaagttgttgaaaattccgtttccagcagccatcatccatgaaatgttaagaagatcaggctgccctaatcttaaaagtaatcctgcagcaggtaaaacggcgataggagtcattaatgactttcctaatttttgacatgctgctaatagcttatttgttacacccaaaataaagccctccttaaattaaataaaagtaaattgttaataagtttatttttagacaacaaaaaaagccaaaaaaagagtacttcctttttcagcttttgcccgtgttggtaacacgctgataaattgtattatataacatttatcagcaatatgtcaatataatggtgaaatgtaaacggtatctgtaataaagtgtattttttacatcgtttacaaatgaaaaaaattttaaatttcgagtcaatatcttaaagtaaaataaaattgtcttacttgtattgacaaatgggtaaaaggaatattatactagtgaggtaaaaaataaaacgtgtaactttcgaataaggcatgagttttaacttgtgccttattattttttgcaaaagggtatacgttatatgggaggaatacaaatgttaggattttttaaaaaaaattgtgagttaatagctcctgcatctggaaaggttttagatttatcagaggttccagataaggtgttttcagaaaagttggtaggtgacggtgtagcaatagaattgtcttcagatacaatagtggcaccagctaatggagaactatctttattatttaagactttccatgcttttggtataactcttgaaagtggtgtggaaattttagttcatataggaattgatacagttaaacttgaaggaaaaggatttgaacctttggttgaacaaggggaaactgtaaaagtagggcagccgattataaaagttgatagagaatttataaaagaacaagggttttctctcattacaccggttttaataactaacccggagttagtcacagatatagaatatatttcaggaattgatgttgacgctggaaaccacaaattgtttacgtataaattaaagtaataaaataaaaactgcctaattaaaggcagtttttattttaaaatactgcctttagtgttgttttttatacgttctatgtgcataaccaagtatgcagtttcatcttctacaacttttttatgcagttcgtcctccagtaatttgcaaattttagaggataatttgtatgattcaggatatgcatgttttatagcgttaagtagttcgttttttataggagaggaatttatgattctttctattgtaaaacgtaagtgagtaataaatctagcataatctattgaatgtttgtctatagtaatatcgagctcatcttctataaattctattatggtatttgatagaaaagcatactttatcgtattggataattcacctttttttcttgctgaatgtatgtgaagagctataaagcctacctcatcttctggtatttcaatatttgttttttcttcaagcatttttacagctttttttgctaattcaaattcagttttgtagagagttgctgtttcaattaaaaatggattttgtatggtatcatttgagagaagtcttttcagtgtaaaagaaatatgatcagttaaggatatgtgtattttttcgtttaagttttcatttaattcctttgatatcatagaaatgatttcttcacaaatacctataatattggtatttactgtagaaacaagctgtttaaaagtgtttgagttattttcattttctatagaaaatactttttcaacatgagtgtctgcggaaattaaatcatctatttttttgccaaagcctattccacgttcaaacaatatcttttctttattgttttgaagaacgaagagaacgttattatttagtacttttattattttaaaatctcctgttgaatttttcattagttatcacctcataattattagtttaaaatcaaaatgtatgtgattaaaaaatatagcaatatgaaagatattaacatatagaaggtttaattacaacttctatatgttaaataagcaagaaataagtacatataaataaaaattccaaccatagacttataatccatggttggaaactttgcttagaatctaaaatctctttgtccctcttttaattcggtaaggtgtttttttactattgatttaaccttttcgttaggtattttttcaacttcagaagctataagtgcttcaccattcttttgagtattagaagaagcataatcctccaagtactctttaagagtcattaaggcgtttggctggcaacaatttgctatttgtcctgatttaacaaggctcatgaaacggtcgccagttcttccttcacgataacaagcggtacaaaagcttggaatataattcatttctaaaagccaattaactatctcatcaagagtacggttatcattgacttcgaattgtgaagagttatcttcttcaggttcagattcaacgtaaccaccaacacttgtgctagaaccaccacttatttgagatataccgagttcaagtacgcgctcacgagtttttttagactcacgagtagagacgatcatgcctgtgtatggaactgcaatacgaataatggctacaattttttcaaaaatctcgtccgatattgcatttgagaagttttcaggatcaatgtcatctgcaggacgtatacgaggaacgcttatagtatgagggcctacacccatagcagcttccaagtgttcagcatgcattagaagtccaacaaagtcatatttgtacatatttagtccaaacaaaaccccaatacctacatcatcaataccaccttccatagcacgatccattgcttctgtatgataggcataatcatgttttggacctgtaggatgaagttcctcgtaactttttttgttataggtttcttggaaaagtatatatgttccaataccagcatcctttaatttcttgtagttttctacagtagtagctgcaatatttacatttacacgtctaattgctccatttttatgttttatgctgtatatggttttgatacagtcaagaatatattcaataggattgtttacagggtcttctccagcctctaaagccaaacgtttatgtcccatatcttgaagagctattgtttctcttttaacatcttcctgtgacagcttttttcttgctatatgtttgtttttatgatggtatggacaatatacacatccgtttacacagtagtttgaaagataaagaggagcaaacattactatacgattaccgtaaaatttttgtttgatttctcttgcaagcttgaacattttttcattttcatcttctaagtcacactctagtaatacagctgcgtctctgtgtgttaaccccttacattcttttgctttttcaattatgctgtctataagttcgcggttacttttattttgttttgcgtattcaagggaatcaataatttcctcatcactgataaattcagttgcaactttagatttaacattatacattaaaaaccctccaattttgttttgttattctttgatagtccacaaagggattctatcattagaacgtgggtagagaactttaaattattaactatatatgatttgaaaataacttataataataaaatccttgtgcccaaaggaacaaggatagcagatatggaaatgttaatctatatatgtgccagagctttaaagctttggcacacattaagcaataaagtttccataataaatcacaaataattatataaaaattgactttgtgaatacatagatgaaatagagtaactaaatcaactatataagaactattctctcgccttctaatttaggactaaccctcattcattcagtacgatattttttataagcgtggcagatctaagaaaaaacaataagagttaaatctcagatataggttcctttagttaaactttagtatgtactaaaatgtttagctagaaactacagatggggaaagcaaactataaaactcaggggctttcataaaatcccatactgtaccaatgttatttattatatcacaatgcttaagaaaatgaactacctaagttgttatatgcttattataaaactaagttatttattacagaagctttgtagttgtttagatttgatgagttttaattttttataaagttatataataattgtacattgtgtaaattaaatatcctttgtaaataatattacatataaggatataatatgataaaattttggatataaacatagtaacagaaaaatattgtaaaaaatattgtaaaatgatataattttaattaacaattattttgaggagtgatcaaatgataatttggggttggggtagagtaactaaaagaaagataggtcaagtattccaacgtacatgtagttattgtaatacaacagcaatatggaacttatgtattgttagaacttggtttactttgttctttatccccgtaataccatatcgaaaaagatattgtgttgtttgcccaagctgtggaagttacatagaattaacagaagcacagtttgaagagttaaagcaagctataaattcatcttctagtaatgccattaatgaagccgtaccagaagttgataaatatgcaggaaagacagaaacacaaaagaattatttaaagcaaatggaagagtataggaatagtaaagcagaatagatgtatacatagaataaatatgttccattatatagaaagcacagaataacaattaacgttattctgtgctttttttatgtataaataaaggaaaattttaaaattatcatataacaatagtataaacaatttgtttttgctaaaacaattttattgtattagcgactaatttatttttaggtatgacaatactaacaaacttcatgtgggcattactgcttgtatggagttttttattttgtgtagaaaggagaaatgtaaagataacaggtcacattatggagaaaagaataatataaattaaaggggaatggaaaatgaagattaagtttttatttgattataaggattatcacatttctatagaggatgaaggagaagaaattgatgtaactgtgaattttacacagcatcaacataaaagaggtaggcaaagaggagtacataagcaaaaaatattggattctctttcagaaggagggaatagtgaaattttgtatttaaagaacaatgagaaggctgttgtgagggattttaagagaaacatatcctatgtaatagaagtttattctgattccacaatagttacaaatgttattacaagcctaaataaaacgaatataaaggcatataaaggagaaaaagtaattattataggaaaaaataatgagcacaattattatttgaattaagtgaagacaagcagctagattaataatccggccgcttgtttttttctataagtgaatttaaagccataatttgtaagatttcaaaatacataaatataacttggaaaaggaataactaaggttagaagtttaatatagcttattatttctatgcagttactgtacaggcaattcagttaattattgggggatatgacatgaagatcaaggacagtagatttaaagtaaaaaacatagttttagtagttttaacattaattcttttatgtggtttttatattatagttagagaaggtatatataaaaaaaatgttgtaaaaaaagaggtgccaaaacaaaataaaattcatcataacaagaaaaaagaaaattctataaaaaaagatgttcctaaagataatattaaaaatcaacctggtggacaatatactccttggacagttaaaagagaggatggtaaaaaggttgcatatttaacttttgatgatggaccatctgttaatacatcaaagataatagaaatactaaacagaaataacataaaggcaacattttttttaataggtaaaagtgcagaggaatttcctgatatggtaaggcaggaatttcaaaacggagaggttataggtaatcatacctacagtcatatattaagcaataaatcaaatccggaaaaactcatagaggattttaacaaatgtgatggggtactaagagctatattggggaaaaattataactcaaggcttgctaggtttccaggaggatcttttggagataggttaagagatactagagaagctgttggtaaagcaggatatagatttgtggattggaatgatgaaattggagatgcaagaggaagaaatttgccggtatccattttattacaaaatctaagaaaatatacttatcctgatactattgtgctcttaatgcatgatgctgcacctaagacaagtacagtagaggcacttcctcaaataattcaatatttaaaagacagagggtacactttctctacattataatttaaggcagccagcttattaaggctgtcttaatatattactttagtttaagggttatttacatttggcatgcaaaggaggggttgacaaataataggtaaatgatttaaaatttaattgttaacctaataaaaattaaaggttaacaattatagtgggggatgataaaagtgaagcctaaagatatgattatggtttctatttttgcagcattaactgcagtgggggcatttataaaaataccaataccatttgttccatttacacttcaatggctattttgtgcattaagtggcattattcttggagctaagttaggagcattatctcaaataatttatgttggaatggggcttatgggagctccaatttttacggaaggtggtgggatatattacatattcaaacctacatttggatatcttatgggatttatagttgcatcctttgtgataggaaaattgtcatcaaaaataaagaaaacaaattttataaaatccttaatgtgtgttttaagtggtttaacttttgtgtatttatttggggtagtttatttgtatgtaatttataacctatacatgggtgataaaaaaactttttcatgggcaatattttatggatgtattatttgtatagggggcgatattttgataagtataattgctgcaatactatctatgaagcttagaagtataaaaaatgttagtgaatttggaggattataatgagaggtatatatttagttggaaccgatacggaaattggtaagacagtaatatcggcggcacttgtttatattttatgtaaagcaggctacaaaacagcttattttaaagcagctttaagtgatgctgaagaacttaacggaaagttgattcctggagataccgaatttgtgtgctctctttcaggaatacaggaagattatgaaaaactaactccgtacatatataaaacggcagtatctccatacttagcatcaaaaatagaaaataagccgattgatatacaagtgattaaggacaagcttactaaattagaaaatgagtatggctatgtactttgtgaggggagtggaggagtaatttgtccaattactgatgtggataataagatatacaccttgggtaatttgataaaagatatgaaaatggatgttatcttagtttgtagagcaggtcttggaactataaatcatactgttttaactgttagttacttaaaaaataatggaattgaggttaaagggattatagtaaatcaatatgaggaaaataggctttgcaaagataatataaatatgattaaaaagatgacagggatccccatattaggggtaatgccttatattaatgaaaataaaaaaaactttatagaagaattaaaatataatgcttgtaatatattcaaagcagatgaaattgcaggcttaatgaaagaagtatgaacttgtttggtggtggaagattatgaaagatattgaaagagatgatttgaaatatatatggcatccttgtacacaaatgaaggattatgagaagatgccaccaatagtaatcgataaaggtgaaggctgttatctatatgatgttaatggaaattcatatttagattgcataagttcttggtggacaaatattttcgggcatagtaataagagaattaataaggcaattgaaaagcagttaaatgaaattgaacatgttatttttgcacatttttcaaataagcctgctgtagaattttctaaaagtcttattcagattgccccagagggattagacaagatatttttttcggataatggatcttcagctgtagagatagctctaaaaatgagttttcaatattatcagcaaacaggaaaagttaaaaagactaaatttgcagctttaactaatgcttatcatggagaaactataggggccttatccgttggggatttagacttatatagcaaaatttataaaccacttcttatagataccttaagaatccaagggccagattgctatagatgtaaatacaataaggaaagacatagctgtgaagctgaatgttttgaggaaatggagaaaagtcttaagaaacataatagtgaattatgtgctattattattgagcctatgattcaaggggcggcaggaatgaaaatgtattctcctaagtacttaaagaagcttagatatgcatgtgattattatgatataagcgttatatttgatgaaatagctgtggggtttggaagaacaggaaaaatgtttgcctgcgaaaatgctgacataagccctgatataatgtgcctctcaaagggaattagtgcaggctatatgcctatgtcagttgttttaactactagtaaaatatacaacgcattttatgatgattatgtaaatttaaaggctttcatacacagccatacgtatgctggaaatgctttagcttgtgcggcagcaattgaaagtcttaaaatatttaaagaagagagtataatagaaaagaatatagggaaatccaagcttattgagaagcttacaaaaaatagagcaaggaataataagtttattggtgatattcgcagtctcggtatggtgacagcaatagaactggttaaagataaagatacaaaggagagctttgactggaaaagtagagtaggatatgaaatatataaaatagcattaaaaaaaggccttcttttaagacctataggtgatgtgctttattttatgcctccttatagtattggagaaaaagatatagaattcatggtggagaaatgttttgaaagtatagagcagtatcttgaataaaataagggctattgaataaaagtcaatagcccttttggcaatacaaaccatgtcttaaaagtaagtaattaaatattgtaacacttaaagaattaatacatagaataaagtgtaatatttaatttggaggcagcgatgtattttgatgaataccaatgtccttttttagacaattatgattatgaacacagagagaacgaggatttgtacaggcaagcaccaagaagagctgtagcaactatagtaggaggaccattagctcctaatattagaggaactgtaacatttacaagtgtacctaacggaacagaggtctctgttgtgcttaatggactgccaccgtatagaccagcaatgggtggaagacctcaggttggacctcatggatttcacatacatcaaaatggtaattgtactccaggaactgcagcacagccttttccaggcactggggaacattggaacccaactaatcaaccacatggaaaccatgcaggagattttcctgtagttttttctaataatggatatgctagaatgacattctttacgaataaatttagggtcccacaagtcataggaaaatctgtagtattgcatgaaagtccagacgattataggacacaaccagcaggagcatctgggagaaaagtagcgtgtggtgttattagagctgttagataatagctttttaaaggggcatataagtccctttatttttatgtaatggaggattaaatagtacataaaattaaggtatgtatggagagggttacatgaatagaaaaaagttaacatgcatatttatgggaattacagtcttctttttaggaataggtatatttgaattaataaaaagtacggcaaaagcaaatgcaatatcaaatagcaatatgaaaagtggtttggaataccacttttctatggagaatcagtctctagataataggttgattaaagttattaattcagcagatattaagctagatatagctatatacgatttaagaaaaaataatattgttgcagcagtaataaatgcaaaaaaaaggggagttgctataagaattattacagatagcaaacaggcaaaattaggagaagaggatgaagaattaagattacttaaagcatttgatatacctataaaaataaatactcatgctggtattatgcacatgaagattactgttgtagataataatacagttactacaggaagttataattacacagacgatgcaacatataaaaatgatgaggtattaatcataataaaaaacgcttcaattgcgaaggattgggaaaaagaatttagcacaatgtgggaagatacttcaaggtttacaagtttatagttaaggaagtgaaaactaacttatgcataaactgtatttgttgtcaaagcacaattgtgtttccataacttatatgataccatataaattatgagaaatagtttaggtatttaatgaatacctttaagtccatataaataaaatttaatatataagaatatagagttttagtatcaataatagattgctactaaaatttgtaggttcaactgaggagtcttagttgattaaaaaggaatcaggtgaaaagcctgagcggtcccgccactgtaataaaggagtttaagtacaatatgtcactgggaaactgggaaggcgtacttaagcaatgatttttgagccaggatacttgccatattctagtatgttttttctacgagcgataggaggaataatcatgaagtataaccataggtgtactatatgcatttggccttttaacgtattgttaaggggctttttattttatcagaataattttcaaaagggagtgtttatatgcatatagaagatggaatattatcaccaacggcatgggggacgttatatgctgcatctgctttatttgtagttccaggtgttagagaaataaagaatagatctaaagaaaacttatattataagccttttttatcaatggtaggagtaggggtttttgtaatatcctgcatgcacatacctgttcctgtaactggttcatgttcgcatccatgtggaacacctcttgcagcgatactcataggtccactagcaacttcagttataacggcaatagctttgttttttcaagcgctgtttttaggacatggtggtattacaactataggggcaaataatatttcaatgggtatagctggagcaatatcaggatacgccttttttaagctttttagaaaatttggcagctcagtatggttagcagctggggtagcaggttttgtaggtgatatggttacctatatggtaagtgccttagaattggctgtaagcttacatggacatacgtcaatattgaaacaatggttaatattttttatgggatatggaccaacacaagttccattagcgatcgcggagggtatatttacagcagtaattattaaagtgatgcttaagagaagaccagatcttttaaaaatagataacttaaagagtaataaggagggttaaatatgaagagtggttctaattccaaaaatcagattaagtggatggacagctttacaaaaaccctactagcagtaatgtttgtgatacttatatttatttttgtgtcaggtaagtacatggaagagcataaaatgaaggcatcgggtacagacgataaggtgaattctatggcatcaacgaaacatcgtccatttatagaacttccaggagacgcagaggttggagctttttcagtggcaaatttttttgcaggacttattttaggacatcactgggaaaaactatttggaaagccaaaagaagataattaaaggagtatttttatgagccttttagaatttaaaaataccgtagagcttgaaagttttcttcatagattcgatgggagggcaaaaactgttgttttcttaattagtatgattacatctgcattgctttcaagatggtatgttattgcaactatgtggcttttctatttgctattgttttttagtgcagggataagaataaataaacttataaaaaggctttctataccaatggtaatggcattaattgtttttgtaaatgtgatttttacaaatggaaatcatattttttacagtataaatattgcagggtttaaattggatatttattcagagggtataagcttggggattataattgctcttagagtaattactgcagctacaattggatatcttcttgtctttaccaccccaatgacagaaattcttgaaaccttaagaatgcttaaaatacctaatactattatagacatagcaaatatgatgtatagatatgttttcataattgaggaagttaaaaatagtatgcatagagcgcaaataagcagaatgggacaaaatacatccatctataggagattaatagactctggaaaaacagcagcctatgtattaatgaaagctcttgataaaagcgtaaatatatacaaggcaatgctttcaagaggatacagctcagaaaccaaacgttttgcttttttcaatgaaggtatacataaaagagatctaatcttcataatattatcccttatctttattgtgctctgcgttataggaaaccaaatgtgaaacttgcattttcacgataaaaattatctatgcaataaattttaaggtggttaaataatgaatcaaataagcattaataatgtagattatatttatagcgatggctttgaagctctacatgatattaatatgagtatcaaaaaaggagaaagagtagctatacttggcccaaatggagcaggtaaatcaactttgttcaatatgcttaatggaatcatttctccaacgtctggagaggttaaaataaatggactagatactaaagttaagaagaatctaaatgtaataagaagagatgttggaatggtatttcaagattcagatgatcagctttttaactcaagtgtaatgcaggaaatagcttatggtttagtgaatatgaaagtatcagaggaagaacttcaaagtagagttaagtgggcgcttaatgttgtaaatatggatggatttgaaaaaaagagtccacataacttaagtggtggtcagaaaaaaagaatagctcttgccagtgttttggctatgaagcccgaagtcttagtattagacgaaccaacagtatctttagatccaaggggcactataaagcttgtaaaacttctaaaaaaaataaatgaagagatgaaaattacaatagtattttcaactcatgatatggatatagtcccactttttgcagataaggtatacgtattaaatgaaggtaaacttattttacaaggaggagtaaaggaagtattcaacaataaaaaagttcttagaaatataaatttaaggcttccaagagtggctcatttagctgagatattgaaaagtgatggatgtattgaatttgatgagctaccgcttacaattggtgagataagaaaatgtatcaaaaatttaaagggggggatttaatgattcacggtggagatatttatacagaaggtgtttttaaagggagagagcttttagattatagttcaaacataaaccctctaggtatacctaaaagttttttaaataacatagatgaaggaataaaaaatctaggggtgtatcctgacgttaattataggcgtttaaataaaagtatagagaattatttgaaattaaaagatataggtatagtacttgggaatggagcttcggaaataattgaactttcaataagtctttttgaaaaaatcttaattatagttccctcttatgcagagtatgagataaatgctaaaaaacacggagtaagtgttgtattttcatatttagatgagaatatgtgtattgattatgaggatataatttcaaagatagatgatgtagattcagttataataggtaatcccaataatcccaatggagggttaataaataaagaaaagtttattcatgtattaaaacttgcagaagaaaagaaaaaaacaattatcatagatgaagcttttattgaattcacaggggatccttcttcgagctttgtaggggagataaaaaattatagctgtctttttataataagagcaatgacaaagttttttgccatgccaggaataagatttggatatggaataacaaataacaaagaaatagcagctaaaataaaagcaaaacaaaatccttggaatataaattgttttgccgaaatggcagctataaattgtttaaaagatactaattacattgaggaatctcttttatggattaagaaggagagaaaaagatttattgaggagcttaataaaataggttttataaaaagagtattttctcctcatgcaaattttgtgctttgcaggcttgaaaatataagtggagaaaaactttatgattctttacttaaagaagacattgtgataagaagatgctgcaattttatagggcttgatgatagctttgttaggtttgctataaaggacgaaaagaaaaatacaaaatttttgagggctcttaagggtgtggaaaataatttatgaatacagcgcttataagtttaaatagttacggagataaaataggaaaaaagttaaggcaagctatggatttagacatatattcaaaaagagaaattgaaaattttaaattaagtactttaacagaaatgcttattaatagatatgaagctctgatttttgtagcgtctacgggaatagcagttagagccattgccccatttataaaaagtaagacggaagaccctgcgataattgttgtggacgtactttcaaaatacaccataagtcttttaagtggacatataggaagggctaatgaaatgactttaaagatttctaaaatattaggttctattccaataataacaacagcaacagataatttaaatgtagaagccccagatgctattgcagttaaaaatggacttataatagatgatttaaaaaaagcaaaggaaatatcctcccttttaattaagggcagtaaggtctcatttattgatgaagaaaatttaattaaatgccctaaaggatatacagatagttttgattccgaggggaaggtttatgtaacaaataaattaatggaattaaaagagaaggaattaaggcttataagaaaaaatgttatcttgggaattggatgtagaaaaaattattctgtagaggctatggagaatatagttatgaaaaagcttagggagcttggtattgataaaagagcagttaaaactataagttcaatagatattaaagctaatgaaaaggctattattcatttaagtgaagttttaaaggctgatttcaaaacatttactaaggaagaaataaaaactgtacaggagatatacgagggaagtgactttgtagaaaaaaatgttggggtaaggtcggtgtgtgaaccctgcgtaaaactttctaatggtcaaatagtcttctctaaaatgaagattaacggtatgactttatgtattggatatgaaaaggtaaagtcatgaaaatttcagcaaagtatcctgctagtgttggtgaagtagttcaaggaagctttaatggaaaggatgtactaatgtcatttcctgttagcttatttacagaggtgacactgtttgaacgtaaggcatctaaggataagtataataatcttaaaaccatgatgtttctagaaaatattttaaatagatggggctttgaaaaatacataaataatatagatataattataagctcaaatattccaaggggaaaaggttttgccagcagtacggctgatttatgtgcattatattatgctcttttacgcttttttggtagagagtttaatgaaagagaattaattgaggaatgtattaatatagaaccaacagatagcataatattcgataaagctactgtgtttgattataaagaaggaagttataaaaaaacacttggagaatatcctaagcttcatattttagtattcgaaggaaaaagaattatagatactgtaagttttaataagaaagaactaaagccgcttaaggatgtaggaaatttaattaaaaaagtagagaaagcacttaaggttggaagcgtaaaagatattggagaagctgcaacattaagtatagtgaaaaattgtgatagacttagctatgatattttagggaaagtacttaggcttaaggatgaaacctgtgggattggaattattggagctcacagtggagatatgcttggaataatttatgatgataagtatgctttagatagtgcaaaagaaagagtggaaaatataaaaaattataaaatatatgagctcgaaactttattaagagctgagatgaggaggggaatatataaatgaatatagaaaatttgataaagggtattaatggattagacaataaggtcatgagtaagattcaaaaaagattggacaacttaacaaagcctttaggaagtcttggaaccttggaggatatagtaaagcagcttggaggaataacaggagaggtgtacccttcagttaaaaataaaacggttattataatgtgtgcagataatggaattgttgaggaaaatgttagttcatgtcccaaaagtgttacagcgtcggttactaggaattttatgaaaggcttcacaggaataaatgtttttacaagacatgcaggagcagacatagaggttatagatataggtgtagatgcagacataaatgaagaaggaataataaataaaaagataagacgaggaaccagcaacatgattaaaggtgctgcaatgactagagatgaggctttaaaagggctagaagtaggtattgaagcagtaaaagagcttaaggataagggtgtaaacctaattggaacgggagaaatgggagtaggtaatactacaaccagcagtgcagtggcttcagttttgacaggttgcccggtagacgaaatggttggaataggttcaggacttacaaaggaagcctttagaaataaaattcaaattgtgaaggaagcaatagcacttaacaaacctaataaagaagatccaattgatgttttaagtaaggtgggtggttttgatatagctgggcttgcaggatgttttttaggagctgcaatttatagaataccaatagttatcgatggttttatatcagcatctgctgcacttttagcagttaaaataaatccattagttaaaaactttataattccgtctcatggttcagcagaacctggaagcaagtggattatgaaagagcttgatttagaaccaatgttgaatttaaagatgcgactaggtgagggaactggtgcagcgcttgcttttcaaatagtagatatggctgtattttcctatcttgaaatgggaacctttgaaaatgctgagatagaaccctataaaccactaaaataatacttggagtgattttatgaaaaaggcaatattaataataagttttggtacaacctatgaaaatacaagaaaattaactatagatgcaatagaagaaaaggtaaaagatgaatttaaggattatgaaattagaagagcatttacctcctataaaataataaaagttttaaaggaaagggataaaataattgtagatactccaggtatggcacttagtagattaaagagagagggttttgaaaaagtaattgttcagccacttcatataataccaggagaagagtatgactttgttaaaagagtagttaatgagtattcttacgattttaaagaaataaaacttggaagaccagttttgtactacaaaggaataacaggagagtttccggatgattatgaaataatggtgaattctataaaaagtataatacctagagatgaaattgtaatacttatggggcatggaagtacacatagttcaaatgcttgttattcttgccttcagcttgtattaagggacaatgattttggaaatgtttttgttgcaaatgttgaaggctatccggaccttaataatgtacttaggtatatagaaaatcatgaaacaagaaaggttaccttgattcctcttatgcttgtggcaggaaatcatgctgttatagatatggcaggtaactcagaagactcatggaaaaacatacttacaagtaatggttttgaagtaacagcctatgttcatggacttggagaggttaaggaatttcaggatatatacatagagcatataaaggatgttatggaaggaagatatgaaaaagaagtgaaggaggaaatcaaatgtccagaattatgattcaagggactgcatcctctgtaggaaaaagtatactggttgcagcactttgcagaatttttaagcaggatggtttttccgtttgtccatataaatctcaaaatatgtctttaaattcatacataacacttgatggcaaggagatgggaagagctcaagtattacaggcatatgcagcaggacttgagcctgaggtttatatgaatccaatacttttaaagcctaccacagataaaagttgtcaggttattgtaaagggtgaagtgtatggagtttcaagtgcaaaaaactattataatatgaagaaagaatttgcaccaatgctaaaagaagattttgaagagttagaagataaatttgatatagttgtaattgaaggagcaggaagtccagctgaaataaacttgagagaaaatgatattgtaaatatgggattagcagaacttgtagatgcaccggtggtattagttggagatatagataaaggaggagtttttgcttctctttttggaactgtaatgcttttagaagaaaatgaaagaaagagaataaaaggtacaataataaataaatttaggggagatgtagaaatattaaaaccgggtctttcgatgctggaagaaagaataaatataccatgttttggtgttgttccttattttaatttatctttggaagatgaggacggtgcagtttattttaatacaaaagtcaattcaaaaatagatgtggctgtaattaaacttcctcatatatcaaattttacagacattgatgctcttaagatagaggaagatgtctctttaaggtatataacctctagtgaaaattttggaacacctgatttactaattattcctggaagtaaaaatactataggagatttactctatataagaaaaaatggtatagaaaataaaataaaacagtatgccgaaaaaaatggacttatctttggtatatgtggaggatatcaaatgcttggaaggcttatagaggatccatttaaagtagaaacagaacttggagaaataaatggaatgggtcttttagatataagaactgtttttgcagaaaagaaggttactacaagagttcaaggtagcgtcattgataaacaaatacctgtgtatggctatgagattcacatggggatttctagttatggagaaaaggcaaaacccttcattaaaatagaaaataaggttgggatagatgatggcgcagtaaacgaaggtggaaatattatgggaacttatatccatggaatatttgatggagctaactttagagaatacatcatcaattttcttagagataagaagggaattgaaagaaaaaagtcagttgtatatgaagatgttagaaatggcgaaatagataggcttgcggatattgtaagaaatagcctcgatatgaacagtatatacagtgttatgggaattgaggggaaaaaatgaggagcataattattgcatcaaatagtagtggaggaggtaagaccacagttactcttggacttatgaaggcgcttgtaagtagaggacttgaggttcaaggctttaaggttggaccggactatatagatacagcttttcatgaaagtgtcacaggaaaactatcaagaaatttggatttgtttttaatgggcgaagatggagttaaggcctcttttgcaaggggaaatggagactacggaataatagagggagtaatgggactttacgatggaagaggagtaacctcagaatactccacagcacatctaagcaaaattttaaaacttccaatagttttagttttaactcctaaggcacaaagtttaacgctgtgtgcagaaatagaaggaatagtaaattttgattccgatataaatatagttggagttattttaaataatatatctgaaggttattataacctgttaaggattgctattgaagaacattttaaagggaaaattaaagtgtttggctaccttccaaagaatgaagcgctttcgcttaaaagtagacatttgggattagttcaaagtgttgagataaacacacttaatgaaaagcttgaaaaatgcagtgagcttctagaaaatcatgttaaggttgatgaacttttaaagtatttctctaaaacttctgattttaaggacgactaccatttaaaaaataaaaacttaaagatagctgttgcaaaagatgaggcatttaatttttattataaagaaaatttagaattgctgcatgaactaggagaagtaacttattttagccctctaaaggataaaaagcttccagaaaatatagattttctttatataggaggaggatatcctgaaatttttaaagatgctttaagcgaaaacaaggacatgcttttagagataaagaataagcttgaggatggaactaggtgttatgctgaatgtggcggcttaatgtatcttatggaagctatagagggaagttctatggttggattttttaaaggaagttcctacatgggaaaaaggcttcaaaactttgggtatgctgaagttacagtaagtaaagaaaatagactgcttcctttgaatataaaaataaattgtcatgaatttcataaatcctatgtaaatacagaagaagaaaccatatattcagttacaaagtatacttatttaggagaaaataagagctggagatgtggttatacaaagaaaaatgtacttgcagcttatgcacatgtacatttttttggaaatctagattttttaaaacatttagtaaggtaaggtgaagcgtatgaattatataaaaaaccctggaaagattgaagaagaaagctttagaataatagaaagtgaaatgggggagcacaattttggggaaagagagcttaaaatagtaaaaagagtaatacataccacggccgattttgaatataaggatttactttatataagagaaggtgctattgatgcagctattaccttattaaaaaagggtggaataacaatttatgcagataccaatatgattacagcaggaataagtaaaaaaatgcttaatgccctaaattgcaaggttatttcttatgttagagatgaagaaatagcagctattgcaaaagaaaagggaataactagatctatggcaggaatcgagaaggctgtaagtgagggaatagaatttttcttatttggaaatgcaccaacagctctttataaacttaaagaacttatagaggagaaaaaagcagctccaaagtttgttgtagccgcaccagtaggttttgttggtgcagcacaatctaaggaggactttgaaaaacttccagtgccaatgattactgtaagaggaagaaagggtggaagtactgttacaacggctattgtaaatgcacttttatatatgttataaaggggaaattaaatatgcttgaaatgtatgtgaattgtgatggtaaaaaactaagatgcggatacactactggttcttgcgcggcaggagctgcaaaagcggcaacttatatgctctataatgaagaaatattagatctaataaaaatagacacaccaaagggaatagagcttatgcttcccattgaaaatataaaaaaaggtgatggatttgtggaatgctctattataaaagatggtggagatgacccggatataacaaatggaattgaaatatgggcaagagctgaggtgaaaaaagaaggctacaccctaaaaggtggaattggagttggaatagtaaaaagtgaaggactttatgttgaaaaaggtgattatgcaataaatcctgttcctagacttatgattgaaaaggaagtaaaaaaggttcttcccaaggataatggagttttaataactgtatttgtaccaaaaggtgaagaaatagcaaaaaaaacatttaatcccagacttaatatagtaggaggaatatcaattctaggaacaacgggtattgtggttccaatgtctgaagaagcacttcagcaatccataaagcttgaaatgaatcaaaagataaaaagcgggattaagaattttacatttttgtttggtaatatgggtgaagacaaggctaaggagatggggattgaccccaagggttttgtgataatgtctaattatgttggatttgctttaaactgttgtagagaaaataacattaaaaaaattttgatggtaggtcatataggaaaaatgtgtaagatagcagcaggatgctttaatactcacagtagagtttgtggagtgcgtcttgaaattttagcactagaacttgctttaatgggggctgacacaaactttatagaaaaaatatatagagagaagaccacagagggcgcagttaaaataataggaaaagaatataaagacatttataggagaattggcgtaaaaatcatgaaaaaaataaaagattttacctacggagaggttaatgctgatattgttttatattctatggaaaaaggaatactttgggattcaagagaggtgatttaaaatgatttatataaaggatgaggaattcataaggggagattgcccgatgactaaggaagaggttagaatccttagtatagcaaagcttgaaatagaagaggatgacacgcttttagacataggagcaggtacaggctctattagtatacagatgagcaaatgtaccccaaagggaaaagttatagcaattgaaagagaagagaaggcgctaaaggtacttgaaaagaataaagaaaaatttaaagcacataatctttatataattaaaggtgatgcatcacagcttaatttagatgaaagctttgatggtgttttcattggaggaagcagtggaaatattgataaaataattaaaagttatgccttaaaattaaaaaaaggtggaaaaatggtgatgaactttataactttagacaatctttatagggctattgaaaccttaaaggaattaaattttgaggtggaatgttctcaaatagcagttagtaaaatgagagctaaaagttatatgatgctttcaaataatcccatttttatagtaacgggaaaagtaatggagggataaatatggctaagatttatggaataggggtcggaccaggagatagtgagcttttaacaataaaggcggttaaggcaattaaaaagtgtgaggttatagttgctccaagtgctatgaaaggaaagagaagtatagctcttaatattgcaaaagagtatataaataaggatgcggaaataatggtacttcattttccaatggggggagaagagcaggaagaaaaaatatatgatgcctttaaagcagttgaagagaagctgttagagggtaaaaatgttggatttttaactattggagatccatttgtatatagtacttatatatatttacttaagcatattgaggacaaaggctatcaaactgaaacgattcctggaataacttcattttcagcctgtgccagtttagcaaatgaacctttggttataggagatgaacctctcttaataataccaggaaatagacttgaggcaataaaggatgaaaaaaatgttgttataatgaaggtttataaaagagaagaggaaatattaaacacacttgaagaaaaaggatttaattatgtttgtgttaaaaaagcagggcgagaaggacaaaaaattactagaagtagagaagaaataataaatgaaaaagaatatatgtcactaataatagcacataggaagtaaggaggaactttatggtttattttattggagcaggaccaggcgatgtggatttaatcacagtaaagggaagaaaaatagtagaaaaagcagatattgttatatacgcaggctctcttgtaagtaaggagcacatggatttttgcaaaaaagaggttaagatttataattcagctcacatgacactagaggaagttatttcagttattgtaaaagcagaagtggaaaataaaataacagttagacttcatacaggagatccttctatatacggagctataaaagaacagatggatgaactaggtaaaagaaacatagcttatgaggttgtaccaggagttagttcctttacagcagcagcttcagccataaaaagagagtttacccttccgggagttagtcaaacagttattttaactagaattgaaggaagaaccccagtaccagagaacgaagatatagaaaaattagcgtctattggagcatcaatggcaatatttttatccgtgggaatgatagaaaaggtagtagaaaagttaaaaaagggttacaaaagaaacgttccaattgcaataattgaaagagcttcttgggaggatgaaagaagtataataggaacactagaggatataacagataaagttaaaaaagcgggaataacaaagtgtgctcaaatacttgttggagattttatagattctaactattctaaaagccttctttatgacaaaaattttactcacatgtatagggaaggtaagaagaaatgatagccttaatattaggtacctctgaaggaaaagtcatactaaaagagcttaatgttttcacttctgatatattggtttcgacaacaactagttatggtggtgaacttttaaaggaatacaaatataaaaagttaaatacacagcctttagaggaagaagaattaaaaaagttactcttagaaaacaatgtaaaacttttagtagatgcctctcacccttacgcttcaaggatatctgacaattgcattaagatatgtaaagatactcatataagttacttgagatacgaaagaccatcagttgccgagaagtataaaaataatgaaaaagtcatttttgttaaagattatgaggaaataattgaaagaataaagagtacaaagagtttaaataaaaaagaaacagtaatcttaaataccacaggaggtaataatgtagaaaagtttgtaaaagcagatataaattctagagtagttcatagaattttgccttctcttaaggttttagaaaacttgtttaagcttggagttaaggttgaggatatagttgcaattaaaggacccattgggcttgaattaaataaaggctttatacatcaatatgatgctaaagcaattatattaaaagacagtggtaaagctggtggaactgaagaaaagatagaagctgcgttagaagaagatatatatgtttttgcaattgagagagaaaagaaaaattataagcaggtattttatacagtacatgagttagttaattatataaaaatcaataaagtgtattagaggaggataagtttgggaaaattatatgtagttggaattggacctggtggtcttcaggacatgactttaaaggcaagaagggcgttagaagaaagtgaagttatagttggatatacaaaatacataaagatggttgaggaactacttaagggaaaagaagtatttgaaaccggaatgaagaaggaagttgatagatgcaaaagggctcttgaactatctaaagataaagtggtttctataataagtacaggtgattctggtatatacggtatggcaggtcttattctagaaatgaaaaaggaagagatagttgaaataattccaggagttacatcctcaatagcagctgctgctctattaggttcacctttgatgcatgataactgttctataagtttaagtgatttaatgacaccttatgatttaataaaaaagagggtcttacttgcagcagaaggtgatttcgtaatttctttttataatccaagaagcaaaggaagaccgtattacttaagagaatgtattaatatcataagaaaatacagaaagaacaatactcctgttggtatagttaagaatgctatgagagaaggagaagagattattatatccacccttaaagattttgatgaaacaaaagttgatatgatgtctatggttataataggaaatagtaatacctttatgaaagataatataatgataacgccaagagggtataaactttagttttaggaggaagttaaatgggaaaactgatttttataacaggaggagctagaagcggaaaaagctcttatgctgaaaagcttgccattagtttaggaggagatattttatatatagcaacctcgaagccttttgatgaagaaatgaaagagagagtaaaaaaacacagagagagaagacctaaaaactggggtaccttggaagcatataaagattttgattcaaaacttttaattgaaactaagggaaaaagcggagtacttctcgattgtataacgaatatggttacaaatttgatttttgaaaaactccctagcgaagaaaacataactacaagggatgcagaaaaggtacaaaaatatgttgaagacgaaatagaaaagctaataagagtgatagaaaacatagacatgccatttattatagttaccaatgaggttggaatgtctttagttccggaatatccattaggtagattatttagggacatagctggttttgtaaatcagatgctagcaaagaaggctgatgaagtttacctttgcatttcaggaatacctatgaaaattaaataatattggagatgatgaaatggcatttttcagaaggctcattttgatgattcaattcttgaccagaataccaattaaatatgagagtgatattacaacagaggattttggaaaggctttagcgctagttcccatagttggacttataataggtggaataatgggagtaacctatatgctattggtaaaagtatttttctataaaatctctgcagtattagtcttaatagaatatatctttttaacaggaggaattcatttagacggtcttggggatacttttgatggagtgttttcaaacagacccaaagaaagaattcttgaaataatgcgtgatagcagagtgggaacaaatgcagtacttgcagttatttctgttattattttaaactatgttatattaacagaaattgatcctgcatatatggtaaaagttattattctttttccagtagcaggaaggcttggttctatagttagtgcaagtttatccacttatgcaagacgtggtgagggaatgggtaagtcatttatagactattgcactcttaaagagctcgcaattggaataatattatatgctgtaatatttttatcagttggattgagccgaggatacataataatgatttttcctatattaactgctgtaatacttataaaatatttcacaagaaaaataggtggtgctacaggagatatccttggtgcagtatgtgagctaaaccagacattttatttaatgacagtatatgcagttttgtattttagagggtgatttaatgctaagaataacattggttagacacggtgaaacagacagcaacagaaataaaaaatatcttggatggacagatgtggaattgaatgaaaaaggtatagctgaagcagaaatggtgagagataaattaagggatacaaagtttgattttgtaatatccagtcctcttaaaagagccaaagcaactgctaaaataataagggataccaatataatttatgaagatgcactaaaggaaataaattttggactgtgggataatctttcttataaagagataaaggataaatatccagatgaatgtgaaaaatggtctagtgactggaaaagctttgtttttcctcaaggtgaagggccgaaggaaatgtacacaagagtttcaaattttatgaataagttaaaaggtatggaaggctctattttaattgttactcatggtggtataataagaagtactatagcatatttacttgaaatgggaattgaaggagcttggcattttgctacaaataattgcggaataacggtaatagaagtaagagatagctatgctgttttaaaatccctaaatgattaagaaaaacatattttgggggggacttataaatgaaaattgttgatggtgtagaaatgcttgaattagaaagtaatgttatgggtaaaaaatctgttattaacgtaacacttctttatgatgaagaaaatgtagttttagttgatactggatttcctgggatgtcagcttatatacgtgaggcagtagaaaaagcaggagtagcccttgacaaagtaaataaaattattttaactcatcaagacattgatcatattggaagtctagcaagtattattaaggaatcaaacaaaaaaatagaggtgttttcacatgaagaggaaaaaccatatatagaaggaactaaaacacctcttaaattagtaaaatttcaggataaggcgaatacatcagatcagattagagcaatctgtgaaaagctaaaaattggatttgaaatggcaaagtcacctgtaaatacaactttgaaggatggcgaaaaacttcctttttgtggtggaattgaagtaattcagaccccaggacatacatttggacatatatgtttgtatattgaaaaaagtaagctacttatagcaggagatgccttaggagctcaagatggagtacttatgttagcagacccactttttgatttcgattctaatttaagtaaaaaatccttagaaaagctcacaaaatatgatattgaaacagttatctgctatcatggtggtttagtaaaaggaaatgtaaatgagagaattaaagaattaataaagtaacagaatgtaactttcagatggacaggcattggtaaaatttattttatgattttaattaaagcttagttataagagcttaaagtgtagtttgctctataactaagctttaattttatttgctttgtataggctttaagattgatacaaatatgttgaagaataggctttgagatgtgacaaggaagttatagaagtaaagcttacaaaaagcttaaaaatgaatggtattaataataaaagttatcttaattataataataagctaatttagccacatgttgaaaaatgtcgaaaaatatgagataatatcgtaatagaaatgagatatatattttatgatttatttgaaaaattcaataattaaatatcctaaaatatgtataaaataaaagataagggtggagagaaggaagatgagaatttttaatgacatgagaatttttaaaaaattaattttagtatttggagtgatttctatatttacaattatagtaggtatagttggattaactagtcttaaaactgtgtttagtaatctgcaaaatatatacaaggtagatcttaagggaaccaatgacctcattcagttaaaagcagactttatggaaacaagagctgatatgcttaagctaaaagataagaataacaaggataaagtagatgatttaattaaagaaatttctgatttagaaaataaggataataaaattattaatgagtataagaacacaattgtaatagcagaagacaggaaactattcaatcaagtgaatatagaattaaaaaagtggggaattgcaagaagtgaatttgttgatgctgtaaacaaaggcgattatgataaggctaatgaatattttacaaaagcctcaagctatagaaatactatgtttggatatttggataaagagattgctcttaataccaaacttgcaaaaagtgattatgataacagtaaagttgtgtatcaaaatgcttttttaatttcaattattgtagtcattataagtgtaatcggttctgttttgttaggattagttatggcgaaacacataaatgatcctttgaaaaaaataaagggcttagcggaaagattatctgagtttgacttttcaacacctattgtcgtaactcgtggtgatgaatttggaaaagtgggaaaatcccttaatgatgcgcagaaaaatgttagtgatttaattaaaattattatgagtaattctgaagatatgagtgcggctagcgaagaactttcagctacatcagaagaactatcttcaaagtcaaatgctatagatgaatctataaatactatagtattaggaatacaggatactagtgcttcatcagaagaaataagcgcttctattgaagaaattaattcaaatataaatgaattagcttcaaaagctatggatggaagtaataattctagtgcttcaaaggaaaaagcaaataaggttactgaacatctagataaggtcagagctgagagcaaaacgttgtatacccaaaaagagaaaaggatactagaggctattgaaaatgggaaagtagtaggaaatataagaatgatggcagatactattgcaagcattgcagaacaaacaaatttgttagcacttaacgctgcaatagaggctgctagagctggcgaagttggaaaaggatttgcagtagtagcggaagaggttagacgacttgcagagcagtcagcagaatcagtaacaggaattaatgatactattgttaaggttcaagatgcttttgataatctttcatcaaatagtaatgatatattaaaattcatgagagaagatataagtaaacagtttgaattttttggcaatatgggtaagagttactataatgattctgactttataaataatgtatcagaagaaatagccgcaatgacagaagagctttcggcaacaataggacaagtaagcgatgcgtcagagagtatggctgagacacaacagaaatcttctaatcgtgcagaagaaataaaatttagcgttgatgaagtgacaaaagcaacagaacaagtagctttaacggcgcagaatcaagcagagcttgcacaaaaacttaatgaagttgtactcaaatttaagatagcttaataataataaaaaatgttcgcagaggtttaaagttgcgaacattttttttgaattatttcatattcttttcaactttttttatcatatctttaaccatttgaccaccaacattatactgcttatcatttgggttggttatgttattttcagcaagttcttttgaggcttctgttttcaatttttgaagcccacctctagctccaggtactagcactcggtggtttctagacatattaatcatctccttttttatagatttcacttttataataaatatattcaaagaataaattacaatagtaatattgcagtagattatatcaagtaatataattaccataagtgtaacacataatataaaggagtaaattgttgtatgaataagagaataaatattcataatattgatatgaaatatatatatgatcctgagtttaaatctaatttgaaaacagaattaataggagatgctgttggaacagagaaattttatataaatatagattatgtaaagccgggaggagaaagcgtaaaatatcattgtcattcaagtaaggaagaatttttcatgataatagatggagaagggatacttagagtaaatggaagagaagtaaaagtgagagaaggagatgtaatatcttttccagcaggaaagagtacagcacatcaatttattaatagtggagaagtgatactcaagatacttgatgtaggtactcgtgaagaagatgatgttattacatatcctgatgaaaatgtagtttatataaaagataagaatttagtttttaatattgatgatagtattaaaggttggaaatcggaccccaatacttaatatttataagcatgaagataaatgtatgttttgataagcatacttattaaaagacaatgagaagtttcgtgtatctttaattttaagaaataatatagtgtggaaatacattccttagcttaaaaagaacataaagatgatgaattgataaaaagcctattgactaataagtaaaatagatatatattatgataaaaaggtaataaatgtataaaaatactttaatatccataaagcgtcttatgtaaatgaaaagcaataagtgaaaattgatttacaaaagggggatgtaagatgagaaaagctttaaaattcacttttactataggtgtattttttctattattgtgtgctaataaaatagtattggcggacaaaatagcaatgcctacagttacatatcaatcacaagtagagaatatcggatggcagagcactgcagcacaagagcagatatctggtaccgtgggacaaggtttaagagatgaggcttttaaaataaatcttgtagatgcaccagatggagctcaaattaagtatcaagctcatgttgaaaatctagggtggcagaatgaagtgactggaggaaatatagcaggaactgttggacaggctttaagggtggaggcaatgaaggtgtctcttgtaaatatgcctggatattcagttgagtacagagcacaggttgaaaatttaggatggcaaccttgggtaagtgacggtcaaatagcaggaactattggcagtagcttaaggcttgaagcatttcaggtaaggatagtaaaggcagctagggttgagtctatatctctaaacaagacattggataccttgtttgttggaaatactgataaaaacttaaaagctatgataactcctgaaaatgcggcagttaaaactataaaatggacatcatctaatccagaagttgcatctgttgatgataatggacaggtaacaggggtaagtgctggagaagttacgataacagcaactacagtggacggtaataagatagcttcttgtaattatacagttagcagcatcaataatgtttcaagtgtaaacataaataaaagtactgataatcttaaggtaggagactttgatacattaagtgcaaatatactacctgataatgccactgaaaaggctgtaagatggacatcatcaaattcttcaattgtatcggttgataatattacgggaaagattaaggctgtaagtgctggaaatgctgtaataacggcaactacagtagatggtggaaaaacagctgcctgctcagttacagttctaaatcctaagaatgatggaatatctgtgtcatatagtgcaaatataaatggtagtgggtggcaaaacaaagttagtgacggagaagtttcaggtactgtaggacaaggaatatcctcacatggatttaaaattgaacttttaaatgcaccacaaggagcaggtattacctatagtactaaggttataaatggagggtggacttatcttgttagagatggggctgaatccaatgcagatgaaccaaatgcggacattgaggcgataacggtttctcttttaaatatgccggggtatcacgttcagtatcaagctcaaattcaaaatataggatggcaggattgggtaagtgatggagcaattgctggcacaccttataaaggtttaagacttgaggctttaagaatcaggatagtgaaggattttagtgtacagtataaggctaaatttgaagataacgccttaacagaaaatcctgtaagtgatggggcaataatagatacaagtggacaagcagctaaaatggaaggaatacaagtgaatttagaaaatgcccctgaaggtgcaaaggttgaatatgaggttcatgttgaaaatataggctggatgagcagcgtttatgatggtgctgtggcaggagctgatggacagaatcttagaatagaagctttaaaaatgaggcttataaatgcccctaattttagtataaaatatcaagtagatgtgcaaggtataggttggactaattgggctagtaatggagaaatagcaggttcaacaggtctaggacttagaatacaaggaataagaataaaagtatattttgataatggaactgatgggagtaatgcaataaattcatcacctaatgtgacagcttcaatttttaactccacaaattataaattatctgaatatctgcgaccttcttgtaatatacagagcacaaatgaaaaggcaatacagctgcatggggggattacaagtaataactgtgtgtacttttcaagcactgccttaagaatggtaggaataaatgttcctacagacatgtgtaatacaggagtttatacgaactttttagcttctcttggatggtcaagacaaattgattatgatttgctgacgccaggaagtatatgttttactgttgatgatgactatacatgccctacacatacttatgtgtttttagattgggtaaatcctgacgatcataccttagcttatgttgctgataatcaaagcggaagtgttcatataagaagtttagtagctacacaacagtttgatccttttgcttattttatgcacgagtagcttttagagaataaataaaagagatatgcataaagattacaaaagtctttatagtatgtctcttttttatataagaaattaggtttaacatcaaattaaaggttatccaaatataaacataataacacgaacattaattaaataaaagctttattttacagtgacaatacgaacattataaaaataaaatggtataatgttattgacttgtgaaaaatattatgctaacataaagttacattgacgaagaaaattcataaatcaaattctaagtaggaggcagttcaatgaaagttgctattatatttggaagcaaatcagacactgaaaaaatgaagggtgcagctactgcgcttaaagaatttggagttgaatacaaagcttatgtattatcggctcacagagtaccagaaaaattaagtgaagttattaagagccttgaaaatgatggatttgaatgcataattgcaggtgctggtctagcagctcaccttccaggagttatagcttctcaaactacacttccagttataggagttcctataaatgcggcaattgacggacttgattctttgttttcaatagttcaaatgcccaaaaacataccggttgcaaccgtaggtatcaacaatagttataatgcaggaatgcttgcagcccaaatactttcgattaaatatcctgaaattaaagaaaagcttgttaaattcagacaagaaatgaaagagaattttataaaggataatgaagaaggagtgcaattataaaatggaaaaaaaagaaatgatgtatgaaggaaaagctaagaaggtatattctacagaggacccagaaaaggttgttatatattataaagatgatgctacagcatttaatggagaaaaaaaaggacaaatagaggataagggagttcttaataataacataacttcaatgctttttgaattgttagaaaaacacggtgttaaaactcattttgaaaagaaattaagcgatagagaacagctttgtaagaaggttgagatagtacctcttgaagtaatagttagaaatgtggcagcaggaagtatggcaaaaagacttggacttgaagaaggctatgagcttaagacaacagtttttgaattatcttataaagatgatgctttgggagatcctcttataaatgatactcacgctgttgctataggagcaactacttttgaagaattagataaaatctatgctgcaactaagacagtaaatgatgtacttaaagagttcttccataagcaaggaataaagttaatagattttaaaattgaatttggaagatataatggtgaagttttacttgctgatgaaatatcaccggacacttgcagattatgggatgaaaaaacaaatgaaaaattagataaagatagatttagaagagatatgggtaatgtaaaagaagcctatgttgaaatacttaatagaataacaggaaaataactattttatcaggctattgtgctaagtagagtactatagcctatatttaacctactgcaatttaaattatttatctttaaaaaagtaaagagaaggagataggtatgataaaagaacagtgcgcagctgaaaatgaagatatggataagttcaaagaagaatgcggtgtatttggaattttttcaaataaagatatagatgcttctagactaacttactacggtttatatgctcttcaacacaggggacaggagagtgcaggcattgctgtatccaatggaaaagaactttgtgtttataaaaatatggggcttgtagcagatgtgttcaatcctgaaattatagattcattggttggaagctctgccataggtcatgttagatactcgacaacaggtggaagtaatgcaaacaatgctcagcctataatgagtaattttaaattagggtctattgctattgctcataatggtaacctagttaatgctgatgttataagagaacttctacaggatggcggcactatgttccaaacttccattgatactgaagttatcttgaatcttatagctagagctgctaaaaagggaatagagaaagcagttgtggatgcaattcaagcaatcaaaggttcatacgctattgtaattctcacaaaggataaattaataggagttagagatccaaatggtataagaccactttgtattgggaaaattgatgatagctatataatttgttctgaaagttgtgcactggatactgtaggtgctgagtttgttagagatgtaaatcctggagaaatagtaatagttgataaggacggacttagaagtataaattttgcagaaaaaacaaagtgcgaaacctgtgcttttgaatatatttattttgctagacctgacagtgtaatagatggaatagatgtaaataaatcaagagaacttgctggagaacaattatttaaggattctcctgtagaggcagacatagtaattggagtacctgattcaggaataccagcggcaattggttacgctagagcttctgggataccgtatactttggggctgataaaaaataaatacataggtagaacctttatagctccaacacaggaacttagggaaaaagctgtatctgttaagctgaatcctgtgaagtcaataatagagggaaaaagagttgttttaatagatgactccatagttagaggaactacaagcaagagacttgtggatattatacgtaaagctggagcaaaagaagtacattttagggtgtcttcacctatagtaaaatttccatgctactttggaatagatactccttatagaaaagacctcattggtgcacataaaacagttgaagaaataagagattttataggagcagatagtttgggatatttaagtatagacgctcttttaaaaacccttggaaaagataaaaaattttgtcttggatgctttaatggtgtatatccagtgtcagcaccagttgaggctgataaggatagacttgaaacttaaaatttttgaaaggttgtgtacaaatggtaacatataaggatagtggagtaaatattgaagaaggatacaaatctgtaaagcttatgaaagattatgcgtctaaaacctttattccaggagttataaataatcttggaagctttgctggaatgtttgaaataggaagcggatataagaatccagttttagtatctggaacagatggtgttggtacaaagcttgcagttgcatttgctactaaaaaatatgatactgttggaatagactgtacagctatgtgtgttaatgatattttatgccatggtgcaaagccagtgtttttcttagattatatagcctgtggtaagcttgaagcagaagttgcatcggatttagttaagggagtttctgaaggctgtagccaggcaggttgtgctcttattggtggagaaacagcagaaatgccaggcttctataaagaaggagaatatgatttagctggttttgcagttggacttgtagataaggataaaataattgatggaagtaaaatagaagatggaaatgtacttattggtatagcatcttctggaatacacagcaatggatattcacttgtaaggaagctaataactgattttaatgaagaatttaatggaaagaagataggagaagttttactaactcctacaaaaatatatgtaaaacctgtattgaaggtattagaaagctttgatgtaaagggtatggctcatataactgggggcggtttttatgagaatataccaagaatgttcaaaggagacttcacagcagttataaataaggaaagtcttgagattccagaaatatttaagcatataatgtcacttggggtagatgaaaatcacgcgtttaatacgtttaacatgggtattggttttgtcatttgtgctgcaaaggaagataaagatggaataatagcatcacttaaagaatctggagaaaaggcatatgaaattggatacgtaaaagctggaggtagtggagtatgtataaaatagctgttctcgtgtcagggggcggaacagaccttcaatctataattgatgccattgaagaaggatatataaaaaattgtataatcgaggctgtcataagcgataaaaaaggggcttttgcaatagaaagagcaaagaaacatggtataaaaagttatacctttgatagaaaagaatataagggaactgtatgtgatgaggtattaaaattgctttataaaaaggtggatttaatagtccttgcgggttttctttcaatactaaaaggtgatttgctaaataaatttaaaaataggataataaatatacatccttcccttataccagcgttttgtggaaatggaatgtatggcatgaaggttcatgaaaaagctatagagtacggagttaaaatttcaggttgtactgttcattttgtagatgaaggaacagacagtggaccgataattcttcaaagtgcggtagaggttctcgcaactgatacaccagatacacttcaaaaaagagttttagaggcagaacataagcttcttccggaggcagtaaaggtattatcagaaggaaaagttcaaatagaaggaagacatgtaaaagttattaaataaggaaaggaagtgaagttattttagctttttcttaaaagttaaaatacttattatgataaaaagagcacttataagcgtatttaataaaaatgggattttaaagctagcaaaatttttaaatgaaaaaggtgtagaaatactttcaacaggtggaacctataagcatcttaaggaaaatggtattcccgtaatagaggtttcagaggttacaggttttgatgaaatacttgatggaagagtaaaaacacttcatcctaaaatacatggtggaattctagcaataagagataataaagaacatatggacactataaagaataaaggaataacaccaattgatatggtagttgttaatttgtatcctttctttgacaaggttaaagagaacataagctttgaagagaaagttgaatttatagatatcggtggtccaactatgataagagcagctgctaaaaattttcaagatgttgttgtattaacagatgtaaatgattatgatgatgtaatagatcaaattgaaaaaaccggggaagtagcttataatacaaagaaaagattagctggtaaggtatttaatttaatgtcggcttatgatggtgcaatcagtagattccttcttgaagatgaatatcctgagtacttagccgtaccttacaaaaagaaaatggatttaagatatggagaaaaccctcatcaaacagcagctttttatgaggcagcttttggagatggagcaatgaagggttttgaacaacttaatggaaaagaactttcttataataacataaaagatatggatatagcttggaaagttgtaaatgaattcgatgaaactgtatgctgtgctttaaaacacaatagtccatgcggcgttgctattggagaaaatcctttagatgcttataaaaaagcttttgagtgtgatgatacttcgatttttggagggatagttgctttaaataaagttatagataagcctgcagcagaagaaatggttaaaatattccttgaaatagttatagcacctgactttacagcggatgcacttgaagttttaaaatctaagaaaaaccttagagtaataaaagctaatgaaaaaccttcagataatttcgagcttgcaaaggtagatggtgcaatgcttgttcaaagtgcagataacaaacttactgaaaaaatggaagtagttacagataagaaaccaacagatgaagaaatgagagatatgatttttggaatgaaggtagtaaaatacgtaaaatccaatgctatagttgttgttaaaaatggagcagcagttggaattggaggaggtcaagtaaacagaatttggccagctaaggatgctatggagagaggaaaaggagcagcagttcttgcatcagacgcatttttcccatttggcgatatagtagaagaggcacataaaaatggaattaaagctataattcaacctggtggttctataagagatcaggaatccattgatggctgcaataaatatggaatttcaatggttatgacaggtataagacattttaaacattagtctataagttatagaatttccttttaaaatgcttgtaaattcaatttaagaggaaattctaagtatgaaaaatagattaattaagttagttttaacatctgtttttcatatagtaaacataataaagtggcaagtgataaagggtgagctgtagaaatcaatccactatagcttatcacttgaaacttgtcatttttaatagtgtacatatcattaaatttattatttggaggtttgttatgaagattttactcataggttcagggggaagagagcatgctatggcatggaaaatggcacaaaataaaagtgttgagagaatatattgtgcacctggaaatggtggaacagctaaagaaaataaatgtgagaatgtgaacttagagaaaacagaagagcttatagaatttgctagtaaaaataatatagacttaacagtagtaggtccagaagctcctcttgtagatggaatagttaatgagtttaaggaaaagggacttaaaatatttgggcctggcaaggtaggggcacagcttgagggaagcaagtctttttctaaggactttatgaaaaaatataatgtaaaaacagctgaatatgcggtttttgaaaattctgaggaatctctagaatatttaaaaaaatgtacttatcctatagttataaaggcggatggattagcagcaggtaaaggcgttgtaatctgtgaggattataaattagcggaagagactataaaagcttttatggttaaagatgtgtttaaaggatcggggaaaaaggttgtaattgaagaatatctagaaggtgtagaagcatcaattttatcaattacagatggaaaagcaataattccttttgtatcctcaaaggatcacaaacagatttttgatggtaacaaagggccaaatacaggtggtatgggagctatatctccaaatccatattgtactgaagaagtacttaaaagctttgaagaagaaattctaaagcctactttaattggaattcaagaagagagaatggactttactggaataatattttttgggcttatgataactaaaaagggtgtgtatcttcttgagtacaatgtaagacttggagatccagaaacacaagtagttttatatcttatgaaaagcgactttgttgacttaataaatgcagcaatggataaaaaactttctgattttgatatagagtggtacgatggaaatgcatgctgtgttgtagcagcttcaaaaggatatcctaaaaattatagtactggttatgaaataagtggaatagatgatgcaggggataaagtattttgtgcaggtgttaaattagagaatggagtttacaagacatctggtggaagagttctatgcgcttcagctagaggaattactttagatgaggctataaaaaaagcttacacagatatagaaagaattaaattcgacggtatttactatagaaaagatattggtaaatctaaataaagaagaaaatatacataaaattaaaaaactatttacatttgaaaaaataagtggtagcataaatatgttattaaaatttcatatgtattttagtgctaggggtgccttttggctgagagaagttaaaaaactttaaccctttgaacctgattcggttaattctgacgaaggaaagctttttaaatgattacttaaagcactatattcgtagtgcttttatttttttcaaaattaaggagaaggaatgtttatagatgcgcataaccatttggatttttttgaggaacaagaaaaattaaataaggctttggacattataaaaaatgacaatataataacgcttggatgttctatggacactaaaagctacaagtttacaaagagtctagctttgaaaaataaaaacattattccttgttttggtattcatccttctagagctcatgaaaactttaagaatcttgaatgttttgatgagtatataagagagagcaaaataataggagaaataggccttgattacgtatgggttaaggaaaaagaaaaatatcctcatatgaaaagggtgttcacttattttctagaagaagctaaaaagtacaataaaataactaatatacatacgaagggtgcagaaagtgaaatatataactatataaagaagtatgaacttaaaacacctataattcactggtatagtggtgataaggacactctaaaaaagcttttagactatggctgctattttactataagtgtggacattggatattctaagctctcaaaggaaattgttcagctgcttccgatagataaaattttaacagaaacagatggtccaacctcacttgaatgggttaatggagattatgggtacccaaacgttatcaaaaatgtagtaaaggaaatctctaaaataaaaaatattcaggaggaggaagtaaaaggcgttatagaaaataattttaaaacactaataaggaaagagggaataacgttatgaaaccagttgttaatgtgagtttgcaggtactccctgttgttgaggaaaaaagactttatgaggtagttgacaaggtaatagagtacataaaggcttcaggtgtaaaatatataattggacctatggaaactactatggagggtgatttagatacacttcttgaaatagtaaaaaaagcacaggaaatttgtgttaaagagggctcagaaagagttgcatccgttgtaaagattgattataaagctgaaggcgtgactatgaatgaaaaagtgggaaaatataaagaataaagtatatcctgtggctgctctaattgctgtaattatattatggcagcttatagtggattttagaaaaatacctgagtatgtaatcccatcacctaaggatatatgcttaacattaattagtgaattcggtactataatgcaaaatacaaaggtgacaatttatgaatctcttgtaggtttttttattgctataattttcgcttttatacttgctattataatggatagttttcagattgttagaaaagcactttatccaatcattgttatatcacaaactataccaactatagctattgcaccactatttataatatggtttggttttggaccgcttcctaagataatagttgttgtgataacatgtttttttcctatagtaataagtcttatagatggttttgaaaagattgacaaggattatataaatttgtttaggagcatgaaggcatctagaattcagattttttatcatttaaaacttccttctgctatggtaaatttgttttctgggattaaaatagcctgcacctacatgattatggcagcagtaataggtgaatggttaggaggagatggaggaataggcgtttatatggtaagggctaaaaatgcctatgcacttgataaggtatttgcctcaattgttgttattgtaattataagtatagtattaatatatattgtagatttcattggaaaaagaataattcattggaaataaggagagattcaggtgaaaaagaaaaaaatattatcattaatatcagcggttattatgacatcagcgattataacgggatgtacatctaatggaagttcaagcagtaataaattggataagacaactgtaatattagattggacgccaaatacaaaccatacgggaatgtatgttgcattagataaaggctactataaagaagagggtctggatgtgaaaattcagcagccttcaagcggaagtgttacagaccttattgcaactaataagggggattttggagtaagctatcaggaggatgtaacttatgcgttaactggtaaaactccacttccaattaagaccattgcagctgttttacagcataatacttctggttttgcagcacctaaaagcaaaaatattaaatcaattaaagatgcagaaggaaaagtttatggaggatggggttcaccttcagaagaagcagtaatcaaagctatcatggagaaaaatggtgcagattttagtaaactaaaaatagttaatataggaaacgatgattattttgcagctacgaaaaagaatgttgattttgcgtggatatttgaaggttggacaggaattgaagctaagttaaaaggtattgatttagattatgtggcagttaaagatttagatcctgctcttgattactatacacctgtaataataacaaataataaaatattaaaggaaaatccagctaaggctaaaaaattcatgcttgctactaaaaaaggatatcaatatgctgctaagcatcctgaagaaagtgcaaaaatactaagaaaatatgcgcctgagatagatgaaaaattggcagtagagagtcaaaaatatatggcaacacattatgcagatgatatgtcaaaatggggagaaatgaaatctagtgtttggaagaactatgctgattttctaaagagtaagggtcttataaagaaggagctaaatgttaaagatgcattcacaaatgaattcttatcaaaataattttggtaagcttgttatagatattaaaaatgtaacaaaaagctttgatgaagaaactgtactaaaagatgtttctcttaatgtaaagtcaggagagttcgtttcgattttaggacctagtggctgcggaaagagtacgttatttaatataataaccgctcttacagatgctgatagtggtgaagttaaggtttcgggtgatataggctatatgcagcaaaaggatttattacttccttggaaaacagttattgataatgtggtacttccacttgacttaaaaggtaaaaataaaaaagaatctagaagtgaagctaaaaaatatattgaaattatgggtcttaaaggatatgagaataaatatccatatgagctttcaggtggaatgaaacaaagagcaagttttcttagaacctttctttcttcaagtgaaataatgcttcttgatgaaccctttggagcacttgattccataacaaagggaaatatgcagaaatggattttacaaatgaaggatgtgcttaagagaacgatactttttataactcatgatattgaagaagctatacttttatctgatagaatatatgtattaggttcaagaccgggagttgttaaaaaggaatttaatatagaattttttatggatgataaaataaaaagaggattttcaaaagaattactagaatacaaaagtcaaataattgggttattataggttttagcggcggtgacgccgctaaaattgattttttgaaataaaattattaagtagaaaagaaattaagtcagtttcacttttttatttttatttaaattaaacagtttgttaaagcaaaaggctactattataacaagtataagataaagatatacaatataacttccccgtgcacctataaagctgaaaaaggctactaatattttcatatgaacaaggtatatttcgtaggctatatttccaagaaataataaaggtttagaagacaatctaaatttaaataaaaataacagtactaaatatacgaatattattgaagcgatagtttggtataaaggcattatagctgatggtaacatgtgtgctaagaaaaagaaaaacgtaaaggctattaaagctataataagtgtttttacataatgtttttctaagaatttagtaagagcatcataatttattgcagcatatacacccagtgggaagcaaaaagctgtgttataccaccattctctaaagcccataaatatcatagcaaaaaagtatacaaaggtaagaaataatagaatatgttgtgctaggttagtgctaagaaatttaaagcatacataaaagcataaataaaaaactagaatagctattacaaaccattgtgtcgagtctattaaggataatccagaaagataaaatattatatcctttagattaaatttagtaccaaagattaatgaggttaatattattgtaatagcgtttattattacaaaaggtaaataaactttgcttaggcgttttgaaaagaaacccttaaaatagtttttcttttttagctttgaaaccattaaaccatagcctgaaaaaaataaaaacatacttacagcaagatgaccaagacaagtataaatacccataaatcctacaggttgcattctaagtgatatatggtgtaaaattatcactagaatggaaagtccttttatgcaatctgtagatttctttgatagaaactcatgattataggatttaactcctaataaggaagagttatagaaaagtagtataggaaataaaacaaatactagtaagtaaataaaaattctgtaggagaagatcaatttgaaagttaaagttggcattatatcaccgtactttcttttaatatacagaagtattataaatattatgaaatatatttgaaattattactcataaggaggtgattggattaagacggcttttcttgaaatgctatcttaattcataattacatggaattagaaaaaataaagggaaatacttattatataaatgcccctactaatataggggtttatgtatttaaaaataaaaattgccttttagtagatacaggaatgaacaacagtgatgctagaaaaattgacgaggttctcataaaaaacgggctacatcctaaatatatagtaaatactcatcatcacttagatcactgtggtggaaatacgtacttccaaaataattatccgggctgccttatatatacttcagaaaaagaaaaggtgagtatggaaaatattcatctttatccaacagggctttttggagctagtgcaataaaagagcttcataaaagcaataaacctttaatggtagattacgttttaaaagaaggggagaataagataaatgatgaaaagtttgaagttatagctcttcctggacatacagtagatttaataggaatagtgacaagggagaaggtatgttttttaggagatagtgtattttctaaggaaacccttcaaaaatactcacttccatatttgtacgatgtagacaaggaagaagaaactttaaaaaaacttaaagaaatagatgcagattattttgttatgagtcattctgatgaattcattgataaagagcagcttgttaagcttttagatgagaatttaaataatatagaaaattacaagaatcaaataatggagcttttggatgtacctttaactagagaggatatacttgaaaatttagctgtattaaatgaactgtctatggactttaatcaatatcatataaatttttcagcagtctctgcatttgtatcccagctgtataataaaaatttactgcagtactctatagaggatggaaagctgtattattttaaaaaaccacaatagtatttacaattataattgacaaggaatgaatagaatgataatattttattcatattatgaacaaaatgaacattctagcttaataggtgataaaaatggttatgtttgaaagatgggaaaaaatcctaaagtatttagaggaaaataaagaggctgaagttcaagaattgatggatgcctttaatatatctaggtctacggttagacgtgatcttatagaaatggaaaagaaagctcttgtaaagaggactagaggcggagttgaaatagctaaatatagaagtgaaggcaaggaaataatagaaaagatttttggagaaaataaggaagctaaaataaagatagcaaaaaaagcggctagtttaataaaggatgatgattttatattcatagattctggttctacatgctactatttaattgattacatagcttcaaaaaatgttactgtggtcacaaatggaataatgcacatacaaaaattaattgagaaggatatagatacttatgtattaggaggatatgcgaaaaaggaaagaaaccttataatgagcgaagacgtggaaagtaaaataggtatgatgaactttgatatatcatttttgggaacaatgggggtagattctattgggggctttaaaactaatcttatggatgatgttaaattaaaaaaggcagttataaaagcttcaaagtcatgttatgttcttgcagatgcttcaaaatttaatgtgaggaaattttatacctatgcaaagcttgaagatttacctgttataactgattcaaaaactgattttgatgatgagagccttaaagtaatacttgcttaaaaaaagagtatctccacaagtagtggaggctttttttagaataaaaagttcattaaatgaattattatgttgactatatgaactttttgaattataatgttcatataaggaatacaaaataattactgatgggaagtgttgtaaatgaaaatgaaggatggctttttgtggggaggagctacagctgctaaccaatttgaaggtgcctggaatgaagatggcaagggaccaagtactgcagatatgatgactggaggaacacatacaacacctagacgtattacacctgttttagaagaaggaacttattatccaagtcatgaagcaattgatttttatcaccattacaaagaagatataaaattatttgctgaaatgggtttcaaaacttttagattatctattgcttggtcaagaatatttccaaatggagatgataaggaacctaatgaggctggacttcaattctatgataacgtattcgatgaacttttaaagtataatattgaaccactagtaactatatcacactatgaaacaccttttggtttaactgagaaatacaatggatgggtaggtagagaagtaattgatttttatacaagatattgtgaaactatatttaatagatacaaagataaggtaaagtattggcttacttttaatgaaataaactgcttaacaattccacagtttggtgcctatatgggtggaggaataattccaaaggagggtgatagtgaggctcagcttagatttcaagctcttcatcatcaatttgttgcaagtgctaaagcagttaaactaggtcatgagataaatcctaattttaagataggctgtatgatagcttatatgtgtaattatgctaaaacatgtaatccagatgatgtacttgaaacccagagaaaggatcagatacataatatgttatgctctgatgttcaagtaaggggatattaccctggctttgctcttaattatttcaaagagaacggtattgaaataaaaatggagaaggatgatgaaaaaatattaagagaaggttgtgtggacttttattcttttagttactatatgtcaaatctggtaagcacagataagaatgataaagaggtttcaggaaatcttcttggaggatataagaacccatacttaaaatcatctgactggggatggcaaatagatcctaaaggattaagatggacactaaatcacatttatgatcgctatcaaatacctgttatggtagtggaaaatggacttggagctgtagatgtaattgaagaggatggctcaataaatgatgattacaggattgattatttaagagatcacatagttgagatggaagaagccgttaagaacggtgttgatttaatgggatatactatgtggggatgtatagatttagttagtgcatcaactggagaaatgaaaaagaggtatggttttatatatgtagataaagataatgatggaaatggaaccatggcaagaaaaccaaagaagagttttaattggtataaaaaggtgatagcttcaaatggagaaaatttggagtagtaatacagtcaggttaaaagatgcatttttaacctgactttttcaaaaaaattaattcatattaagattggattgaatagttagtatgtataaaacaaaaaacgactaattacgatattttttaaaaaagttattgacaattaatataaaagggtataatattaagacatggttaaacgattacaaattaatatctgggattgttactgattcgatcaggcgagacccgagcttttgaaagtaatatttatattattttcattagttggggtttttatttttagatcaatgttgtaaatggggtaattctgatgacgataaaaaagatatttaataacaatgcaataatagctgaaaattcagataaacatgaatttgttgtcatggggtgtggaattgcatttaagaaaaatataggagaaaaagtagatgagaggctaatagaaaaaacttttattcttaaaggaaaggatgcatccgaaaagtttaaaatgctgctggaagatgttcccacagagtatgtttcggtatgttatgacattattgaatatgctaaaaatgttttagatgcaaaattaaatgaccatatatatgttactttaactgatcatgttagcaattgttttaaaatgattgaatcaggaattattatacacaatccattaatttgggaaatcaaaaagttttatcctaaggaatttaaagttggacttaaagctatagactttataaaggatgaattaggaaaagacttgccagaagatgaggcagctaatatagctctacatttgataaatgcacaaattaacaattccttaaataatgttgaagatgctgcaaagcaagcaaaaatgatacaggatattttaaatatagttaagtatacttataatatagtacttgacgaaaagtcgataagttatgaaaggtttgtcacacatttaagattcttctttcatagaattgataagtcagaaacagtagatacagcagaggaagattttttattaaagcaagttagagaaaaatataaagatgcataccaatgtatgcttaaggtacaaaagtatcttggaaaagaattgtcagatgaagaaaagctttatttaacagttcacattcaaagggtctcaaagaaaaattaaataaaaatttggattgttactggtaatgcaggcgagaccaaaatagacagtataaaataaaattatgctatctatggggtctcgctttttttatattatttatactaatgaacttatacattattcttatattttataaatcaaaagaaaaggagagattatcatgaaatatgaaaagttggccaaagatataatagaaaatgtcggaggaaaagaaaacgttaacagtttaacacactgtattacccgtttacgttttaaactaaaagacgaaagtaaagcaaacacagatgtgcttaaaaatatggatggtgttgtaaccgttatcaaaagtggaggacaatatcaagtagttattggtaatcatgttccagacgtttatgctgatgtagtagcaattggtggattttcatcttcatcagaagaaggaacaaaagagaaaacaaacttatttaacgcatttatagacactatttcaggtgtatttacaccaacactaggagtacttgctgcaacaggtatgataaaaggctttaatgcaatgtttatagcttttggatggttaactaaaacctccggaacctacaatattttaaatgcagtaggcgactgtttattctacttcttccctatcttcttagggtattcagcagctaagaagtttaaaggtaatcactttattggtatggcaataggtgcatcacttgtttacccaacattatctactttgatgacaggaaaaccattatatacattgtttcaaggaaccatatttgcatcaccagtttacgttaccttccttggaattccagttatactaatgagctattcatcaactgttattccgataattttagcttcttatgtaggcgttaaggttgaaaaagcatttgcaaagataataccagatgtagtaaaaacctttttagttccattctgtactttacttgttatggtacctttatcactaatagttattggaccaatctctacttgggcaggtaaattattaggagcaggaacactagctatatataacttaagcccaattcttgcaggtttatttataggagctttctggcaggtattcgttatatttgggcttcactggggtttagtacctatagcaatgaacaatttatcagtgcttcactatgatccaatactagcaggaactcttggagcttcatttgctcaaacaggcgtagttttagcaatattaattaagacaaagaatgttaaattaaaaggaattgcacttccagcatttatttcaggtatatttggtgttacagagccagctatatatggtgttacacttcctcgtaaaaaaccatttatcataagttgtataggagcagctattggtggaggtataacaggcttcatgggaactaaactatggatgatggggggacttggaatatttgcaataccaagctatatcggagcaaaaggaatggacagaggtttttatggtgcggttatgtctgttgtaataagttttgttgtaggattcttaataatgttctttgctggctttaaggatgaggaagttaaacaagaaacaacaaaaaagaagaatgaattagtaaagcaagaaactttagtaagtccattaaaaggaaaaattaaaacattatcagaagtaaaagatgaagctttttcaacaggctcacttggaaaaggaattgcaattgaaccagaagaaggaaagcttgtatctccagtagatggtgttttagcaacactatttccaacaggtcatgcagttggaattataagtgataaaggaaccgagatattaattcatgtgggcatggatacagttcaattggagggaaaatattttaaaactatattaaaacaaggagatcacgttaaggctggtgatacaatattagaatttgatatacctaaaataaagaaagctgggtatactctgactacaccagttgtagtaactaattctgaaagctacctggatgttattgaaacagataaaattaaggttgagagaaaagatcagttattaacagtaatgttataaataacttttactttgagcataaggttgacttgtgctcaaagttttataaggagagatgtttaatgtcaaaaggttttagtaaagaatttttatggggaggcgctacggcggctaatcagtgtgaaggtgcttatttagaggataataaagggttatctacagttgatgtaattccaaagggaaaggaccgttttcccgtaggcttaggaaaaatgaaaatgcttgagtgtgacagtgaacattattatccaagtcatgaggctattgatttttatcacagatataaagaagatatagctctatttcatgaaatgggctttaaatgttttagattatctcttgcttggtcacgaatatttccaaatggggacgatgaaataccaaatgaggagggattgaaattttacgatgcggtatttgatgaatgtttaaaatacggaatagaaccattagttactataactcattttgatgttccggtgaatttagtgaaaacagtaggttcctggagaagcagtaaaatggtagagtattacgaaaaactgtgtaaggttatatttagtcgttataaaaataaggttaagtactggcttacctttaatgaaataaatatgctattgcatttaccttttataggtgcaggtttagtttttgaagagggtgaaaatgaggaagctataaaatatcaagcagcacatcatcagcttattgcaagtgcaaaggcaacaaaaatagctcgtgaaataaatccaaattttaaaatagggtgtatgctagctgctggaaataattatgcaaacacatgtgcaccagaagatgtgtggagatctatagaaaaggatagagaaaactatttctttattgatgtacaatctcgtggagagtatccaaactatgctaaaaagatgcttaaaaggaaaggtatagagcttcaagtagaggatgaagatgctggaattttaaagaataatactgttgattttatatcatttagttactattcttcacgcctaactagtgccaatcctaatataaatggaaatactgaaggaaatgtctttgctaccttgaaaaatccttatctaaaagccagtgaatggggatggcaaatagatccgcttggacttcgaattacattaaattctttatacgatcgttatcaaaaaccattatttatagttgaaaatggtttgggagccgttgatactccagatgaaaatggatatgtagaagatgactatcgaattgagtatttaagagagcacattaaggctatgagagatgcagttaatgttgatggtgtagaacttatgggatacacaccttggggatgtatagatttagtaagtgcttcaactggagaaatgaaaaagagatatggctttatatatgttgataaggataatgatgggaatggaacattaaagcgttctaagaaaaagagtttttattggtataagaaggtaatagaatcaaatggtatggatatagagtaaggtctaaatattaagcgttgaagaaatttgttcgagataataatacaaaattagataaaattgtaaaaacacaatcataaaatacaataaaagcagtttgaggtaaataaaaaatgaccttaaactgcttttttattttaaaactattgatgttttttgctatatttaatataataaaattatttacagaaaaagatagaataatatacattttatgaagttaaaacatatttgttatgaagtgtaaattggaatttaagggagataggtgcatgtatggcggaggtgagctagtatggataattcatacagcggtaaatattcgttaagtgactttaccataaataaagataatgtagaggttaaagaaaccctttttaagaatagtgaaaatatttttcaagatattacgcttaaaattagtgaaagagataaactacaaaatacaggtagttttaataaaacaataagctatttctacagtggctttgatgataagaaaaagtatttagaggatatacaaaaacttcatagtaagcttcttgttttgaataatttatatatttattattgtaattcaataccggtgcttgcagatgaggaaattactaagaagatatctaatttagtatcaagtttacaaaataataaccaagctaacgaattgaaaaaatttataattgaagaggagtttttcaatattactccaataagcgaaataaacaaggaatataaagaaaagtttaattttattttagataagtatattaaagaggaaccagctgttaatataactaaacttaaaaacttttcagtaaaaatactttcgtgggcaaaaaaatatatttgtcagctatttaagcttgaaataaaggattttaaccctaagattatatactatggttcagtaaaaaaacatgaaagctattttttaatactgttaaacatgctcggatgtgatttgttaatacttgatacagcagggaaatctgagtggacaaaagtagatagaagtaaagaatatgctgttattttagaggggaaaattaaagaagatattagtgagaatccttttaaaaataataaagaatattttaatgataaatcatctaaaattgaaaatatatcaaatgcaggatgtgcagtatataccagcctaagaaaaacggagaatatttttgaagatattaaattgaatgttgaaaaaagaggtgggcataaagatagtgataactgccaaatacctgtatttttttatagatacataggtgctaataagagcgaaataaataaagaagaatacaataacagtttgtatctgttagataaagagcttcaagctggaaaatgtaattatgtgaaatttattagtcaaattgatcctcctaaaagtgatgaggttaacaagtttgtaaatttggttggtaatatatttaataatgtaattaccttggataagaagttaatttttacagaaataaaaaacaataagctatttccaaagcttttaaataaaagtatttcgaattcaatagaatacgcatttgaaaaagttatgggtatgtatttaaagaatgaaaatactaacacaacaaaggttaaaaattttattgtaaaacttattgtttggataaacagatattcaaaggaattattcaaaaacgctcctataaaaggcttttttaattacaaccctaaaattttatactatggagaaataaaatatacagaagtgtaccttttaatatttttttccatgatagggtgtgatgtgatttatataaatagcgactatgacaaagatgatgagtttatacgtatagataaagaagaaaaatatacgaagcttcaaaaaaatccttatagttttgagtgtgaaagttttcctacagaagagaaattggttagaaaagctactgtagcttataatgcatcaaatgaagtggaaaagctgttgtttactccagattcaggaatatataagtcttggcagtttgaaaacttcaatacgctcccggttactcttaagacaacctttgaagaaatagcgattctttggaaagaagaagctatgataagaactggttttaaaatatctaataatacagtgtacattccaaacatttttgccaaaatagatggtacccatgaggatgtatgtgaatacagaaactatattagtaaattaagatcagcaaaaaatacttacttcattgataaacctaattttttaaatattagttttacgcgagagcaaattttttcttttgcgtatcttattaataaagatggtgctatttgcaaagaagatttaattaaaagtaagctttatagatactcgtatcttaaggagagtactcaaaacttaataattaagaaaataaatgaagtaataaagtgtggctacatactaaatagtattgataataaatttattgtgagaattgtggctgtacttttaaatcttaatgaagaaatattagatttaatacaaaaatttgattttccacatgctatccctaaagttattatatacacaaatgacaaaaatgattttagtgaagaggatataattactattttgtttttaaacttaattggattagatatccttatattagctcctacaggctacagcaatattgaaaatcatgttgaaaatagtatttttgacaagcatgagcttccaagctacaaatttgatttgaacataaatgaaatagaggagaaaaaagaacttaaatttcttttctccaaaatatttaagcacaactaaggaggatattaaaaatatggatattggaaatacaattaattttaataaagaagctgaaactgaatttgatttagatgcaaaaaagaaggaaatacaagctaaaataaaaaattcacctgaagtagagaatattgtaaggagaattgatatatcaaatccaagctcaatactaacctttggaaaagaagctactgagcaaatggcaagtactgctgataatctgctgcatcaaatggaaataaataaagtagaagactctggaaaaatgcttgaacagttgaaaaaaataatggataagtttgatataaaggagcttgaagcagatgaaaaacaaggtttccttagcaagttatttaaatcaacaaaaaactccttagaggctttatttagaaagtaccatactatgggtgatgaagtagataaaatttttataacaataaaacaatatgaagcagaaatagagaaggtaaataaaaatttggatgatatgtttgtaggaaatgttgaggcctatgaacaattagaaaagcatatatacgccggtactttggctatagagtatataaaacaaaatataattgctgatttagagagtaaagcgtctagtggcaatgaaatggataagatgaatttagaaaatatgaataaggttgtggaaatgcttgagcagagggtacaggatctaaaactagcagagcatgttgcacttcaaggaatgccggatataaaaacaatgcagtatagtaattttggacttataagaaagataaattctgcgtttataataacgcttccaatattcaagcagtgtcttgtaaaggcaataatgcttaaaaggcaaaaagtacaagcgaagggactttcagcgttagatgaaactacaaatgagcttttacttaggaatgcaaatgcaacagctgagcaaaataaacaaattgcaaagctcacttctggaagttctattgagattgagacgttagaaaaaacttggcaaactattgtaaatggaatagaagaaacaaagaggatacaagaggatgctaagcagaaaagaattgatactaatagaagattagaggcattaaaggaagattacaagaaaagaaatatttttgcagataatagggagtaaaacgcttaaaattctaagcatatctattgtggtagtttagtgtttaaggcggtttaatcatatataataaacgttattttaggagggaaaattatggctataatattaacaaaaggtcaaaaaataaatttatcaaaagaaggaattttaaaaaagatattagtaggtttaggctgggatacaaataaatatgatggtggatatgattttgatttagatgcctcagtattttgttgtggagaagacggaaaagcacataaagatacagactttgtattctacaataacttaaaacatccttcaggtgcaatagagcatttaggagataatttaactggtggaggagaaggagatgacgagcaggtagtaatagatcttgaaaaagtgcctgaagaaatacagaaaatagctttctcagtaactatttatgatccggaagtaagaaaacaaaactttggacaagtttccaatgcttttgtaagaatagttaactcagataataatgaagaattagtaagatatgatttaggagaagatttttcaatagaaactgcagttgtagtagcagaattatatagaaataatggagactggaagtttaatgctataggaagcggtttccaaggtggactagcagctttatgtaaaaattatggacttaatgcttaggaattttattgttataggaaaacaaatttgttttgttttcctataacacaaatataggtaggtgcagcttgtggcaataatattagaaaaaggcataaaagttaatttagctaaaaaagaatctatagggaaaatcaatgtaaatttaaactggaatcaaggcaataaagaaagtgataaggataaaaataaaggatttttcgccaaaatttttggtaaagataaagaacaggttgtagatgaaaaagtaatagacttggatttaggatgtttgtatgaattaaaggatggaaaaaaaggaatagtacaagcacttggaaataagtttggaagctacaacgaaaatccatatatatttttagatggcgatgacagagatggtaattcactagatggagaaaatttagttattaatggaagtcatctaaaagatataaaaagaatactcgtatatacatttatatacgaaggagcagtaaaatggagtgaagttgatggtgtagttaccattaaaagaccaaatgaagagcatattgttataaatatggatgaatataaaagtggcatgagaatgtgtgctttagccatgattcaaaatgtgaatgatcaaaatttttctgtagaaaagcttgttaagtattttccaggacatgaggcaatggatagaaaatatcattggggcttgaaatggaaaagtgcaaagaagtaaaattgagataaggaagatgataatatggctattaatttacaaaagggtcaaagaataaatttgactaaaggtggacaaacattatcaaaacttactgtaggtttagggtgggatcccatatcaaaatctagaaaatcaggttttctctctagtatttttggagttaaacagagtgaaatagactgtgatgcatctgtactaatgctaaatgaagattataaattagaaaataacaatgtggtatactttggaaacctaagaagtagatgtgaaagcgttattcatacaggagataaccttacaggtgaaggcaatggtgatgatgaggtaatatatgtaactttagataaagtacctagtaacatacataaattagtttttgctgttaacatatatgactgtataaatagaagacaagattttggaatgattaaaaatgcgtatattcgtgttgtgaatagctcaaataatgaagagctcgtaagatataacttaactgatgactattcaggtaagacaacagtaattgtaggcgaaatatacagaaatggaagtgagtggaagttcgcagccataggagaaggaacaaatgatactaatttgaatcttatttctagaagatatagataaattttattgaagttggaaataatttttaatagtaaattaactgtagtgagagtatcttaaaattagcttttagaaaaggttaaaaagattctcacgcataaggagaagattattatgaattttttacatggactggtaaataactatgctcagtttttttcacttaaagtactaattgctactttatcagacccatcaaatttgatgatgatatttagcttgattatactagagggcttattatcctcagataatgcggtggtattagcaataatggttaagcatttaccaaaaaaacagcagaagagagcactcttttatggaatatggggagcttatatatttaggtttattgctattggagtaggtacatatttaataaaaatatggtgggtaaagttaattgcggctctatacctattaaagatgacttatagccattttgcaggaaaagcagaagatgatgatgtagatgaatcgaaggtttcaaaaaaaggattctgggctactgtagcaacagtagaattaatggatatagcctttagtatagatagtgtgtctgcagcttttggagtatcaagtaaggtttgggttttgttcttaggagcggtttttggaatattggcaatgagaggtgtagcacaaatatttgtggctcttatagaaaaggtgcctgaaatggaaagttcagcatatgtgttaattggaattataggtataaaaatgttattgaatttaataaatattgaaatacctaatactattttctttggagtaatagttgttgtttttggtggaactatagcatttcactatatacgacaagcaggtgttaaatctcaaaaacagaattaaagtaagagaactttccgcagtttgaagctaatttaaaattggttttgaactgtttttttatagaataaagaaaatctgtttttttgctttttcaaaatgatgtagacaatataattgacgcggtctcggaaataatctaatatagatatatatgtaatttatggatatgaggaaggggggataatatggacaaagagataatagtacgtgaagtattaaaagaagatgacttaggtatgatagagtatctcaaaaaaattgctgaagaatcgaattttttgacttttggcaagggagaagtaaagaaaagtgttttagaggagagggaattcatagaaaatgctataaagaataaaacttccctttttatagtagctgaaagtgaaggaaaaataattggtaatctcaatttttctacaggtgagaattctagagttagacatacaggtgagtttggagtaagcgtgctaaaggaatattggggacttggagttggaagaaaattgataatgaatctaatagcttggagtaaaaaaaatcatatagttcgaaaaataaatttaagagttagaactgacaattatagggcaataaaactatatgaaagcttaggttttgttaatgaaggaacaataaaaagagactttttaattgatggtgagttttacgattcattttccatggggctttgcattgactaaacaataaattaaagggtaaggggtttattatgttatatattttaattattttaggtgcagctctaattgttttattgggagttaaacttatagtgaggcgaaaggataaagtagcgttaacggtttctgcagatatttcttataaagaagttttttcagaagcagagacaaagggaacaagagttgttgatgattacggcagaaggtatgaaatattaataaacataaaggttaaaaatagtggagacaataactttgaaatagtaagtgcttttatggaaatagaatttgaaaatggtgttctttatgaaattagaattatgccagatgatcttcctaagatgttaactgaaggagaaatgattgaaactaatatacaaaaggaatggattgattatgagaatataaattcctttggagtaatggattcaaaaggaagacactattatcttcctaaggaaaaattagataagctttggattaagtccaatgatttgcctactacaaaacttgaaggctatgaaaaggataatccccttaaagtaatggaagcatttgaggcaaaagataagagcacctttattagaaaaaattaatttgtgaggagattttgtaatgcttaaagagatagaagaaagaagaagtataagaaaatacatagataagccagtagaagaagaaaagataatggagattattgaaagtggaagattagctccttctggaagcaacactcaaccttggcattttataatagttagagaagaggaaaacagaaaaaaaattatagaagcatcacataaacaaaagtggatgcttacagcaccagttattatagtatgcgtttctgatattcgctcaagacttgatgaaaatttagagatatccttaaatgaagatagtccagaaattgaactaaagcaaatcataagagatacagcaatggcgactgaaaatatggtgcttcaagctaaaaaccttggacttgatacctgttatgttgcttggtttacacaagaagaaataaggcctgtactcaatatacctgaggataaatatgtgttatccgtattaaccttaggatattctgatgaaaaacctaatatgcgtcctagaaaaagcttgaaggatataattcatatggaaaaatggtgataaggtgagagaatttaagctgaaaaaaggagataaagttggcataataagctgttctgatggaataaaaaaagaaaataaaaagagagtggaaagtgtagttgatatattaaaatcaatggaaattgaagctgagctttcaaaatgcatatttagagagaaggctgaattttcaggaagcggtagtcaaagggcaaaggagcttatgagacttttccttgacaaggatataaaggctatttttgatatttcaggaggtaattcagcaaatcaagtattaagtgatttagattttaatatcataaaaaacaattacaagccatatttcggaatgagtgatttgacagttattttaaatagtatatataaaaaaacaggacttaaaagctatcattatgctatatacaattttggtagagaaaactcaagactccaaatagacaggtttaaaaaatctttcattcaaggaaaagaagatatctttgattttacttacaagtggcttagaaaagatgtaattgaaggagaggtagtaggtggaaatataaggtgctttttaaagctcgcaggaacagaatattttccaaaccttgagggtaaagttcttcttcttgaagccttaagcggaaatgtaagtaatatatcctctttagttgaacaactttctatgcttaatgattttaataagctttctggaataattttaggtacatttactcaaattcaggaggaaggcaatattaatatcctagaagaaataatactcgaaaaaacaaaagtatttaatattccagtaataaagacagaagaaataggtcatggaagtgacagtaagtgtattgttataggagagaaaattaaaattatataaaattgtagagtactatactaaaatataaaattcattttagtatagtacttttttattttggtaaaactattacataattaaagttaaataatttttagaggtgatttttttgagtcttaatggattttatttgcttcctcaccctccaatagttgttccagaggttggaagaggggaagagaaaaaaatagagaatacaactaaaagctttgaagctattgcaaaagatatagcaggtaaagctcctaatactattataatagttacacctcacggtactatgtttcaagactatattgcactagcctatgaagatgaaatatcgggaagctttaaggattttcgtgctcctaatgtgtcaatggagcttaaaataaacaaagagcttacaagcaaaatatatgaactcgcatacggagaaagaataccttcagtaatggctacaaatgatattttgaaaaaatacaatacgtctgttttcttagatcatggttgtatggttcctttgtactttataaataaatattataaggaatataaaatagtacatattacttatgcagctctaagtgatattgagttatatagatttggaatgaacgttacaaaagcagtagaagaattaaatgaaaatgctgtttttatagcaagtggtgatttatctcacagattaagagaggatggtccctatgggtataatccagctggagaaaaatttgataaggagcttttaaataatctgaaggatggaaatgtagagggagtttttagtatagataaggatacagtttataatgcaggagagtgtggaagacgttctgtagcggttcttcttggaacacttgagggaaagaagtttaaaggagaaattttaagttatgagggtacctttggagttggatacggagttatgaagcttgaagctttttctaatgatacttcaaaattaaaggaattagagagaataagaaaagatgaatatgaaagtaaaaaacaagaaaaagatccatacgtaaaacttgcaagagaaagtcttactcaatacttaactactggggaggccattgaagaaattccagactatgtaacggaagaaatgcgagatctaaaaagaggggtatttgtgtccttaaaaaaatttggagacttaaggggatgtattggaactatattcccagtgactgataatattgcagaggaaattataagaaatgctattgaggcggggttaaatgatcctagattttatgaggtaggaaaagatgagcttgtggacatagacttttcagtggatgttttagatgagccagagagtgcgacaagagaagagcttgatcctaaaaaatatggagtaattgtaacacatggacgaaaaaaaggacttttacttcctaacctagagggagttaatacagttgaggagcagcttgaaattgcacttgaaaaagcggatatagattctcatgaggactatacaatagaaaaattcatggtaacaaggcataaggaaagttaaagatgaaagtggaagccatgttttatgaaaaaattaaagataaagttcactgctttttatgtcctcataattgtgttatagaaaatggtcattttggaaaatgcaatgtaagaactcacgaagatggaaagctttttacaataaactatggagaaataacctcaatatcactggatccaatagaaaaaaaacctctttattattttaaacctggtagtaagattctttcggtaggaagttttgggtgcaattttgtttgcgatttttgtcaaaattatgatatatctcaaaggaaggccagaagcacatttgctccaaaggaagaacttattagaatagcaatgactacagaagataacataggtcttgcatttacctataatgagcctagcatatggtatgaatatatgtatgattgcgcaaagctcttaaaggaaacagacgaaaaaagatccgttgtatttgtaactaatggttttttaagcgaagaacctttgaaaaaacttcttccatatgtagatgctatgaatatagatttgaagagctttaaggagtcttactataagagtctttgtggaggaaggttaaatcctgtgttagaaaccataaaaatggctgcaaaggtttgtcatgtagaggttacaacactattagtgagtggggaaaacgataatttagatgaaatagaggaaatagctaagtttttagcttctgtaaacagtgaaatacctctgcatctttctagatatttcccaaggtataagcttgaaaatccaccaacagatgtagagtttatgcaggaggctaagaaaacagctgaaaagtatcttaaaagggtaatgcttgggaatgtatagatggtaagagagtaactttaggaggggttatgcatggacaatttgttaaacatcgttattatactcttacttgtatttatgaatgcattttttgttgcagcagaattttcaatggttaagataagaaaatctagaatagaaacgctggtacttgacggagataaaaatgctaaatacgccctaggagtaattaataatctaaattcttatttgtctgcatgtcaattaggaataactttggcatctttaggcttaggttgggttggagagccagcagtgtcaaagatgttatccccattattcaatctccttaaaatacctaaacaaattattggttctatttcggttgtggtgggttttataataataactggatttcatattgtccttggagagttagcccctaaatctgtagctattttaaatacagaaagtatagcaaaagctacagctattccattaacactattttataaatttacttatccaataatagtagcctttaataaaagtacggatcttgttttaaagctatttggcataaagcaggtagatgagcatgaagaggctcatacggatgaagagataagaatgctggttgaggagagctataagcatggtttaattgataaaacagagttaacctttgtggataatgtatttgacttttctgaaaaaactgtaaaggaaattatggttccaagaacagatatgaaatgcatttttgtagaggattcctttgatgatatagtaggagtaactatagatgaacatttcacaaggtatcctgtatgtgaagaaagcaaggataatatcattggactcatacatataaaggatttatataagctaaaaattaataaagaagatgaaaagatagaaagtattataagggaaatcaaatttgttccggaatcaatgtccattagtgaactatttagaatgtttcaaaaagaaagaatgcagatggcaatagttattgatgaatatggtggaacctttgggcttgttacaattgaggatattttagaagaaatagttggagaaatccaagatgaatttgatgaggaaatggaagaaattataaaaacagaaaatggaagctatgtagtagatggcaaggttttaatagaagatatcaacgagcttttagatatagagatatatgaggaaaatattgatactataggaggatggatttattctaagttgaagaagtatcctaaaaccaatgaaaaaataaattatgggaattatcaatttataatattaaaatgtgatagaagaagaatagaaaaaattcttattaaaaatttatgaaatagacttgtttgtttaacattcttaagagtacaagaatataatgtaattgaattattttaaggagaacatatattatgtattcagaatgtccatattttagagaaacaaacaactgtcctgtgccacctacaaattttccgcctcagcatcaaaatcgtcagccgggaatagagagcgtaatgcgtcctagacctatatataataatccatgctattatgcctcaggaaaactgagaaacaaggttgcattaatcactggaggagatagtggtataggaagagcagcagcggttgcctttgctaaagaaaaagcagatgtagctatagtatatttgtatgagcgtaatgatgccatggaaacaaaaagggttatagaatccttagggcagagatgtcttaccattgaaggagatgtgagaagagatggattttgcagggaagctgttgagaggactataagaacctttggaaatcttaatattttagttaacaatgcagcagttcagtttcctcaagatagtatattaaatataacaaatgaacagctagagaacacttttagaactaatatattttctatgttttatataactaaggcagctcttccttatcttaaatatggcagctcaattattaatactgcatcaattacagcatatgaaggtgaaaaaacattaatagactattcatctacaaaaggtgcaatagtatcctttactaggtcgctttcaaaatctttagtagataagggaattagagtaaatgccgtagcaccaggacctatctggacaccacttataccagctagtttttcagctgcaagagttgcaacctttggaaaagatactcctatgaagagagctggtcaaccgtatgaacttgctcctgcatatgtgtatttggcatctgatgattccagctatgttactggtgaggtaattcacataaatggtggaagaatggtaaccacttaatgcttgggtgctgtattaagcagcatcctttttaaattttattagtgatataattaaagtaggttaaagaaaagaagtggagtgttaagtatgaagctaaaaaaactaaataaaagtacatatatttttacttatgataatattaaagaatactctacaaatgtatttttgattaagaagaaaaatagagtatatgttatagataccttttgtggaactaaaagcatggagcctattacgaatgaaattggagacaaggagatctgtgttataaatacacattttcattgggatcatatttttggaaactctgctttcaaggatgccataataatcagtcataagaaatgcagaaaaatactagaagagtcttgggacagtcagctaaaggagaacgaaagatatgttctaggaagcgcagaaaaatgcattcccaatttgacatttaaaagtgagattatgtttgaggaggatggaattgaaatattctatagcccagggcacaccgaggacagtatttctatctttgatcatgaaagcagaatattatatgttggtgacaaccttgaaaagcctatagtatatgttgaaaatagtgatattgatgcgtatatgagtacacttaaaaaatatatcgaatatgatgctgataaaatttttgctggacacactttaaatttgactacagaggatattttggatacaattaattatctagaagccttaaaaagaggagataaattagagtttgatactgagcatgaaagaaaagtacacagtgataatgtaaatatggtgtttacgaaaggagaaattactaatggtaaacttaaagattaaaaagatagatgatgcagcaatattaccagaatgcgcacacgaaggtgatgcaggattggatttattctcagttgaggaaaaagtgattaaggcaggagaaagtgctttaataggtacaggtattcaaatggaacttccacctgaaactgaagcgcaagtaaggcctagaagtggactagcattgaaacactcaataacagttttaaattccccaggtactattgatgaggggtataggggagaagtaaagataatacttataaatcatggaaaagaagactttaaggttgaaaaatctatgaaaatagcacagatggttattaaacctgttttaaaagttaaggttgaagaggtaaaagaactgtcatcaagtgatagaggcactggaggttttggttccactggactaaaaaaatagtaggtattatataaatctaacataagtatttaaacttatgttagatttttttatttcacaatttaattataaatataaatattgcataaaaatcgttaataaaaacatctatttgataataaaatattaaaaaaatattatttttttatgataaaataatatcaagtaaaacctacataatatataacatgttaaagggggtaaagatatgcttactacttgcaaaagtgttttaaaattgccttaccttgagaaaataaaagttgttgcaggagaaaaaggcttaaatagaattataacttgggttcaagttgttgaatatcccgaatattcaaagtggcttaagggtggggagcttatacttataagtggcattgctataaaaaataatataaattctcttgtgaattttattagagatataaattctagaagtctttcaggaattgttattagtataggaccatatataaaagaaattccaaaggaagtaatagaaattgggaatcagcttgattttcctatatttgaaattccttttgaggtgaagttcattgatgtaagccaaagcatatgtaaggctatttttgcaaacaaggttaaccaagaatctatggaaaattttatgaaggatataatttttagagattttacattttcagaggacatacttagtagagctgtggcctatggatataatcctaaaacaaaatatatttcttttgtagtggagcttcataatgaaaaagatatgctggagtgtgatttgaagaccaagcaatatatagaacaaattgttatagaggttctgggagagtggaacaagagaagcatacacataatgcaatataattcaattattcttatgctgcctaaaaatgaaaagaggactataaaaaatatagctatgaacattatcgaggaaatcatttcaaaagctaaaaatacaagtgtaaatattggagtagggggagagtttagcgagcttagggattttaaaataagtgttagtgaggcacatagatgtcttaaggttctaaagcttaataatgacaataatactgttataagttatgatgagctcggtatttataaattattttttcagatggataatttagaggaaatgaaaaaattttatttggatgtgctaaaaaaattgattgattatgattctaaaaacaccactgagcttatgaatactcttgagatgtatataaaagaaagtactaatataaatagaacagcagaaaaactgtttattcatagaaataccttaaagtatagaataagaaggatagaggagattacgaaatgcagtcttaaggatgtaaatgtactattcaattttgacactgcgcttaagataaagaagtttcttacaatggaaaatgcagtatagccgtatatgataaatgtaaacaaaaaaaatcctccgaatttgtctattttggatatatgaaagttatttgaaatatgataaattatatacagtgaaattgataaattaataattatataactaaaaaataataaagtattaataaagactgaatatatctattaatttaatatgcgatttggaggagttaaatatggaagaaataaatgctaaagttgtaactaaagtaccaggacctaaatcaagagagcttcttaaaaagagagaaaagtatgtagcaaagggagtaagttgttcatatccagtatttgtagaggaagcaaaaggcgctttagtaaaggatattgacggcaatgtatttgttgattttgcaggtgggattggagttcaaaatattggacacagggacgatggagttgtagaagcagttaaagagcagcttgataaatatattcatgcatgttttcatgttaatatgtatgaaccatatgttgacctggcagaaaagcttacggaaataacgccgggtaattttgctaagaaggccatgtttgctaatagtggagctgaagctgttgaaaatgctataaagatagcaagagcgtatacaaaaaagtcaggtataatttctatgaatggttcttttcatgggagaacaaatatgactatgtcaataacaagcaaatataaaccgtataagaacggatttggaccttttgtatgtgaaacctataaagcggactatgcatactgctatagatgtccattaggttgtaaatttaaagactgcggcatagcttgtgctgaaaagttaaaaactatgcttaagacagttgtttctccagatatgattgcttgtctcatagtagaacctgttcaaggagaaggtggttttgtagttccacctaaagattactttaaagctcttcagcaaatatgcaatgaaaataacatagtatttattgttgatgaagtacaagctggttttgctagaacaggtaagttttttgcccacgagtattttgatgttgatgctgatattataactatgtctaaatccatagctaatggacttcctatatctgctgtggtaggaaaggcagaaataatggatgctgcttgtgttggaggaattggtggtacctatggaggaaacccactttcttgtgtagcggcaattaaagttatagataaaattaaggaagcaaacttaaatgaaaaatcaatagaacttggaaaatcaataatgaatagacttaatgaaatgaaagaaaagtataatgttattggagatgtacgagggcttggagcaatgattggagttgaatttgtaaaggataaggataccaaagaaccaaataaagagatagtttcaagtatattagattactgctttaagcatggagttatttttctaaatgctggacttctagggaatgtccttcgtttcttgcctccagttgtaatgaccgatgagcagctaaagtatggattagatactttagaagaagctataagaatagcgatttaaaaagataataattaaatatatattgggatggcttttttgtgaatgtttcaaagaagtcatccttaattttttgttttatatttgtagataaatgtattaacaaaggtgtacaaaaccccgtaaattgtattaccaatatttttgtatttctgaacctaaaagtaaaaatgagaaattaagttatatattcaaatattggactcaactataaaaaaattaattacgataatatatataggtgcaaaagaatccaattttttataagttatgaaaaagttataatggacttacttgaaaggttggattataatactttaaatttataagttatggttatgggtttagaggttggctatacttcaagttatgggaggagagtattttatggtagtaagagaattaaatgatggtgacattaaaagttggggagattttattaatgaaagtgttttgaaatctacctttgttgaagactttaagtttaaattgtgttttaaacttggagtagagactaatggaaagctaataagtgcagttgaagttaaaggcggagaggatgaggtcaaattgtacagtttgcctcagtataaagaagttgactttgaaggtattctaataagtgcagcaaaatattataacagctgtcactaggagtattttaagataagagggtttctaaagtaaatatttaaattagaaaccccgcaatttttttatttatagccatttggatgatttttgtgccatttccaagctgtttctattatagtttcaagagaattaaattttggcttccaaccaagttctaagatagccctatctgaagatgctattaaagttccaggatcacctgcacgtctttcacctatctctgcttttatatttattccggttacctttctagttgcttcaactacttgttttactgaaaagccttttccatttcctaaattatatattgcacttttgccgccgttttttaatctttcaagtgctaaaaggtgtgcagaagctaaatctgaaacatgaacataatctcttacgcaagttccatcttcagtatcgtagtcatcaccgtatatcattattttatccctttttcccaaagccacttgaagaattaatggtattaaatgagtttcaggattgtgatcttcacctatatttccgcttatatgagcaccacaggcgttaaaatatcttaatgcagtatactttattccatatgcattgtcacaccattttaatattttttctactgcaagctttgattctccataaggatttgttggaaaagttttatcgccttctaatatagggatattatcaggttctccataggttgcagcagtagatgaaaatactatgtactttacatcatgatttttcatagcttctaaaagtttaacaactgattgaatattgttatcaaaatactttaatggatttgctacactttccccaactagagagttagcagcaaaatctataacagcatctattttattttcatcaaagaccttgtttaaaaaatcctcatctcttaagtctcctacataaagcttattgtttaatatagattccttatgaccagtggtaagattatctacaataactacattatgaccattttcaagaagataagctgccatatggcttcctatataacctgctcctccgcaaactaatacgttcataaattatatacctcccttataacctaaatatattacgtatttattttagcatatatttactatttaaaaaaatatttttagtgaatacattgttaagatttgtatttcaaatgaaactatattgatttcattcgaaatggtaactataataaatggaggaaagcgtattatagctttttcaagaagggtgagtaagtttgaatttaagacaaaataaaatttttaatataatagtaaagagtcccaagattacagtcaaagagctaagtaaattgctttctgtgtcagaggttacaataagaaaagatttgtcttcacttgaggaagaaagattaattaaaagaatacatggtgcagctgaaatttcttcagattctattgaaagtaaaatattatccaaatatgaagaaaagcttaggatagcaaaagaaggaataaaatttgtagacaatggcgacactattttgattgaagcagggtcaactaatgctcttttagcaaaacaaatttcagaggctagaaatgttcatataattacaaattctctttacatagctgaaaatttgaaactcaaggaaaacgttaaaataacgcttataggaggagaactacaaaaggaaggggatgcgcttgttggtcccgttgcaaaggcttgtttaaatgaggtaattgtggataaggcgtttattggaatggatggcttttcaaaggaactgggcttttgctgtagtgatttttttagagctgaaattgcaaaagaaatgtgcagtaaggcaaataaagttatagttctgggggaagcctctaaatttgaaaatgttggagttacacttacagctaagtttaatgaggtttatacggttataactgatacaaagatatcgaaggaaaatatgaatatactgaaggaaaataaagttagaactttagtagtttaaagtaaatattaattggaggaatacaaaatggcaaaggataatctaaaaaaaatatctgctaagaaggctttagaatatataaaggataacacggtaatagggctcggcggaggagagacaataggatatttatgtgattatttaaaggaaaaaattaaaagtggtttcaatattaaagtggtaacaccatctataaaaactagaaacacctgtattgaaaatggtattgaggttttatatacatcaagtgttgaacatttggatgtggcttttgatggatgtgatcagcttgatgaaaaattaaacgcccttaaaagctgtggaggaatacattcaaaggagaagattattgcttctatggctgataaatatattttacttactaatgaaagtaaattcgtaaagaaattagattctacataccctatagttttagaaatattggaggagtcagcaggttatgttaaaagaagaataagtgaaattggtggaaaagcaacctttagatcaagtgctgcaaaggatggattcactataacggatagtggaaatctattgttagatgtattctttgatgaattaggagatgctaaggaacttcaaaaggggcttaagggtataacaggagttgttgaaacttctttatttgtggatttagtaagtcaggcgataatagcttatgaagatgatataaagattatttctaaataaatgaatatataattccaaatttacgaatactaacaatatattaggtattggagggattatttatgcgtttaccaaatcatataggtataattccagatggaaatagaagatgggcagtgtcgaagggtatgtcaaaagaagagggatataatcctggtatttcgcctgggcttcaacttctaagactttgcaaacaagttggaataaaagaagttacatactatggttttacagttgacaatactaaaagacctaaaaatcagagattagcatttacagacgcttgtataaaagcagttgatgttatttcaaaagaaaatgcatcgcttttagtagttggaaatactgaatccgatatgtttcccaaagaactacttccatatactaaaagaaagtcctttggagatggaggaattaaagttaattttttagtaaactacggatgggaatgggatttaaataaaataaaagaaggggaaaaaagcagcaagaaagtggtaagttatattaattcttcatatatatctagggttgacttaataatcagatggggaggaagaagaaggctcagtggatttcttcctgttcagtctatatattctgatttctatgttgtagatgattattggccagattttaaaccagagcatttttttgatgcattagattggtatagtaaacaggatattaccttaggtggttaataaaatatagaatttttcgtaaaaatcattctaaaagagaatgatttttatttttttggggcaaataaagctttaattattgataataataaaaaattcgagtttatttaacaataatcttataagattgtaaaatttattgtttacatttgacaaaaaaaatagtattattagttgtaatgaagatatttcatattttataaaaaaatttactaatatgttatttttattaaacaggcgtgggggaataggattatgtatgaaggattacttatagatattgactatttattgaatgtagtaaaggaactaaaaataaactttgataaaaagataaaaacacttaacttactaatagaaagaaatatacctatagttttgtacacagaaaacaacaaagaatatgtagatactattatgaaatatttgaaaataaaggagccagctataattgttgaaggggcacaaatatattctccttttgatttaagctatgaagccgtttttcctttatcaattaacactgtttgcaaacttggaaattgggctatggatagaaaaatggacatgagtataagtacagataaaaaggttattgattattcagagtggcttaaggaattaagacaagtaaattataaaaatgcaggcgataagttgccaagtgctgtaaaggttgacatatgcatgaaaaatgacgataagaggattgagcttttgaacttcatagggaagaataatttagaatgttatgctcatatgtatttaaatcatgtggcttgtataaattcaatagtagataagggaaatacactaaagtatcttgcaaataagaaaaaatgggatatcaagaaatttgctatgataggggattattctaaagacacatctatttttgatgaagttggatttttaatgtcaatttcagattttactaaggattttgaaaaaaatttcgacaaaacacttaaaagtgatatgatgagtatagtgtaattagagtttaaaacaattatataataaaatttaatgtgagtaaattataggcagaaattaagctcaatccttaattcctgcctttttattatttcttttgtttaactgtaaacttctttattaaattgtggtttaaagtattatccgaatactcaagctgtgtaagggcattatccttttcttgctttaatttagtggattcgggaataacacttcctgtttttatatcatagtaggtgttagtccaggatacataaaatacatttccatcagtaaaagagccatttcgaaagattacatttctattttttgaagcaaataaatctgtaccaagcatataattttgtggtaaattaaacatattagctatagtaggatataaatcgatttgccctgaatactcgctgtttattcccttatattgatcttttggaaaatggattaacataggtactttttgaagctcataccagtctaaatcagttggattcttaatgttctcaaagtcataaagatcatttattttgtcctttggtatagcataatgatctccatataaaatcacaactgaattatccataattccgctcttctcaagcttatcaagaaacgttccaagttgagcgtccgtatagtgtattcctttaagataatttccaagcaaagttccctcataatcaccaacgttgaaatcgccatagcccttagtatcatcataaggataatgactgcttaaggttattataaaagagtaataaggcgaagaaaaactttttaatttattaaagctttggttcaagaatgatttatcactcaaacctagaccaacattttcatttatattaaagctcttttctccaaagaaatccttgaatttttcagccttatacataacatttctattccagaaaccctccttgtagccatgaagcacagcagtataataattattgtcattcatttctttagcaagggagctgtaagtatttccagcatataaataatacgcagcaccagaagcagctggataaaatgaattattagccaaaaattctgcatcagaggtattcccagaggatacttgatagaaaaagttattaaaatataaggatttattaatccacctatttaaatttggagtgatctcctgattttcaacctttgaatttattacaaactgctgaagtgcttcaacttgaatcattataagatttttacccttgtaaagtcccgtcatagaagatggagcattggcttcatttttattaagggcattttttatggtattttctgtgtcctttgaaagcctcttgctgttagaaattttattttctgttacattatacaagtcaagaacatgaaaatctaaggttcctaaaaacttatttatgtagaccttattgtacatagtttttagtaaatttggttgggacacggacatcttgtatatagtttttccattaacatatccagcaggtataactaaaataaaaaatagagcaaatctaaagatcagttttaattcatatcttttatgtcttctataaaaaaataagaaaggtattaataaaactacatcaattaaatataaaaagtcataagggcttattaaacttgttacacttgactttactcctccaagcataactccattttttataacgcctatagatattatgtctttaaaatacctaaagtaaacagtatcaactattaccaagatacttattacaatatctaaaatgtacaagattcttgttctaatcttgtttttgaaaattacagctatgcttaaagcgcatatggtagaagatagtattggcttaataattaatttataatgtgtgtattcaggataaatcaatctgtcaaatttaatcaatttcataggaatgattattacaaaaagcactatatctaaattatcaagcaggaaattttttagtttctttattaagtttctcataaatcctccgcttttttaaaaaatttactgattttataatattccaataaaaaatcattgtaaagtattttagatatataaactaaaaatttataaaaagtaatgtttacatagttttaatattagtgcataatattatgagaaagctttaaagtagtaaaatgaaagtacatgaggagaaatgaaattaatgagaaaaaatgaaactagagaatttttgattgaagatatagaatttcctgcggtgggagttgcattttataacgataaaaaggtttacataaaaggggcagtgccaggacaaaaggttttagctcgagttagcaaggtaaggcgtgaaaaaatagaagcaaagcttaaggagatagttacaaatattccaggtgcagctcagccaaaatgtcctgatttcggagtgtgtggaggctgcgttcatcagtttttaccctatgaaaaacagcttgagtttaaggaaagagaagtacttaagctttttaaagatgcaaaaatagagggctttgaatatttaggaatactaggcagtcctgaaaaggaagagtacagaaataaaatggagtacacctttggagattttgtaaaaggaggagagcttaccttaggaatgcatgctaaaaacagcggcttttctatagtgaatactgataagtgtaatatagttgatgaagatttcagaataatactaaaaactgtagtagagtatttcagaaaaaaagaccttcctatatataaggttatgcagcatgtaggttatctaagaaatttggtagtaagaaaggctaaaaatacaggagaaatcttaatagcccttgtaactacttctcaggtcgattttgatttaactgagcttactgaaattcttaaaagtataaattatcttggagagctaaagggaatacttcatgttataaatgatggtttagctgacatggttcgtggagacaaaatcgtaactttatttggtcaagattacataacggaaagaattctggacttaaagtttaagatatctctattctccttttttcaaacaaattctaagggagcagaaaaactatacagtgaagtactagagtttctaggcgatgtttcaaataaaactgtttttgatttatactgtggtactggaactataggacagcttgcttcaaaaaaagcagaaaaggtaataggcattgagcttattgaagaggcggttgaggcagcaaaggaaaatacaaagcttaataatatttcaaattgcagctttatagcgggagatgttgcaaaggtaataacggagataaaagaaaagcctgacacaataattctggatccaccaagaccaggagttagtccaaacgcaatgaagtatgttattaagtttaatgcgcctgaaatagtgtatgtttcctgcaatccaaagacacttgtaaatgatcttggagttttaagggcgtacggatatgaagttgagaaggttaaaattgttgatatgttccctgggacggggcatgtggagacggttgtgttgctacaaagaaaaattatatagaaatccttaattttaggcacttcttcaaccattttgtttttacaaatgagggggataaaatccgcaataaacagttaaaaaaatatattaacgtttatgtggttattgatctggaatgtgggaacacaatagaataaaattaaaagttatgggatactgtgaaaatggtatctcttttttatgattggatattcagaaatgactgcctatttttgtgtaaaaattagggaaaaagtgattagcatacaatgaaaaaatgagggatttttatctttatttataaaagaaataaaatcattctgtttaattgatatttacctaatataaagaaacacaaatatattttggcatatttgtggaaaatgaagagggatatttagaattttgtagaatattaaaaataaaattcattatagacatataaaaagtgagtttttaagagtatagtaatttattaaaacattgtgagattatagaggtgaatttactgtgaaggaagcaacaggagcaagggaatcaaacgcaggagatgattttcattttatttggtctgctaaaaaatcacttcaattgttagaacctgatacggaacttgaagcaatatgtgtagaaggaccaagtattgaagatagcataatttttgaagatgatgaaaaggcattattatcaatagatgtcgctgagtattttggaggaaaaaaatatgaagatgcaagcagagtgattttttctcaattaaaatatagtactcgccatggggacttgccctggacactttcgtctttatcagtatctacaaattctgggaaagataattcaattattcaacgattagcacaaacatataaagggtttaaaaaaaaacatcctaaagacatagagaaattaagattaaaattagtaaccaataggactatagaagagaaatttaaaaagcttatagataattgtaatgaagaaattgaaaagaatgattgtaaaaagtatctcgatttaaagaatgtattacctaaagaaaatcatgattatttaaagtcgttttaccaagaaacaaagttgagtaccacagaatttgtaggctttttaaaatgtattgatttgagtgaatgtggaagtgacataagagatatacatgaatcagaggtaattagttctttggctagacttggaatgttagatttgaaaaccaattatgataagctaattcaatttataagaaaacaaatgtctccggaggaaaatgagtcagtgccgattgacaaaaatattatggcaaatttctttaatacaattccggatggtttgtttcctgctaattcacaagtaataaaaccacaaaaatatattaagagaaatattagtgatgatattgtcagagaaataattattaatagaaagcaacatatttgtttacatgcgactggtggaataggtaagactacagtagtgtctgatttggaaagtggattgccaattggttcaatagtattattatatgactgttttggtggtggatcatatttagatccatctacaccattacatacatacaaaaatgctatagtacagttaagcaatgaattagcattaaaatgttacaccccatttcttgttaaaactaatttagatgaaagtgagtatttaagaaatttttccattagacttaaacaagcatctaactatataaaagcaattaataaagaagctgttatattattagtattagatgcagttgacaatagttatttagcatcagaagtattaggagatacatgttttgcagacaaacttttgaaaattactttgccgcaaaatgtttcaattttagttacatcaagaacagaacgattagaaaaatttgaattaccttacggaacaactatgattaaattagaaggatttaataaggaagaacaacgtaattacattgatctgttttatgaaaatgtatcagattatcaatgtgaagaagtaagaaaacttactaacggtaacccgagggttcaatactatgttttttcgaagatatctggtactattgaagaagcattgcaatatcttaacccaaatgggaaaaacttgcatggaatattcgaagaagctataaaaaagatagatactagaataacttcagagataatatcttttgaagagctgtgtagagcattagttgaattaccaagaccaattccaattgatattattacaagttctactgattatgatattgaaaaattggaaagtgcatgttctgaatatttgattggagtttattttggaaatggaattataacttttagagatgaagattttgaagattatttaagaacaacaattaaaaatggtgaatcggcaataataaaaattgctgaaacgctttataataagcgatttgatgactattattctgttaaatatttgcatatatttttgggaaaagctcgaaaactaaatgaaattttggattcaatctatactataaataatattaatatctcattaattgaagatgaaaaaaacgaaattatatcaaaacgaattaaaagtgctttctcaatcgatgatatctataataataattatagattggatgcatataaacttttatattttttaactaaatgtagagctactgatgctggagtaaaggaaattatattagagaatattagactagctaagaaattaggatttgaaagtactatttccagatatatttcgggaaaatcagattttaattcattaagtgaattgacattacaaacatatgcaaattcattacttaaacatactgagttagcagatcaattttttgctacatcttctgcaataataaaacagtattcgaaagaggaaaagaataataaaaattttcaacatacaattgagagactagatgtatcacgattaggtatatacatggcaatgagatatgattcggaaagattagtcaattggatgcatggttggagtccatatcctactcaagaatactttgatattacttatagtttacttttgcaagggaatatagagaaagctaaatcaataattagcctatctgatgatatagatatgtttgcagcatgtgcaattgcatttgaagaattaaatcattctataaacgatgaaatttggattttaggtgaaaatcttactaattatatggaaaaaaagaaaaaaatacatgtaacagacttgaaatataggattagtctagcagagttgttattaaaaagaggaaaaattcaagaagcagaaaatatagcttataataccgatataagaatggatttttcatatatatcattttatgaaatgaatggtgaattgccaaaagaatatacatttagattgtatgcattaaagaagtacttaaaaggtgaaaaatattgttttgatgatttttggatacctagcgttagaaaatatgagaaaaatggtagtcacgagataaaagaaaagcgagaagaattgaaaaaaatcatagattttattattgattccttttttattagagttagaatgttagctggttcaagtatagataaaccagctaacatggatcaatttcttgaaaaaatttcaaattgtgaacatggattttatcaattttataatgatcataattcttatgattattatagaataatcataaaaaatatatttgacatattgtttagtcaagaaaaaagtttaataaaagaatattgtaaaagaaatttagaaaataaatatttagataataaatttcactttaaaataatacacgaaattataaaaaataaaaagtatatagatgttgcagcatggtatttaaacgagcttgataaaaaaatgaatagatatccacagtctgcatatgaattaaaggaattttatttagagtgttcaaagaaagctgtaatatttgataataaattatcgtatcagtatttccttaaagcaattaaagctattataggtgtagatgatgaagcttatagaaggataaacttgtttagacaactttcagaaaattatataaaagacgaaaatgcatctgaacttgtatataattttacacgtattatagaagatagttatagaaggctagaggatagaaaacatcttcctacagataatattttcaaactattaaccaacattcacccgtcttctgcaatagcagcagcttgtagattggaagatagagatgaaggttatgctacattaggctttgaaatttcaataccatatattattgaagaatcgttatataaggatgaaatttcgaaagaaattgccatagcactttctaatatagatgttaattatggaactacatatgatgatattgtggatatggtaatagaaaagattaggagagaaaaaaacaaaagaacagaaaaaattatgcaagttattgcatatgatatagaaaaaatatcaggtggctttgaaaacagaaatatcatagaaaaaatttctttatggtgtagaaataattatagcgattcgattgaatttataaaaaagttaaatgaatcatattgtcttgtggcaagtaccattagaaatatagattctggtgaatatgataataataaactttcatgggatgaaatagataaaagtaaaattgaatataataaaaaatcactaatagttacaatggaatcaatttattataaggaaagtgtaaagcttgcgaagtatgtattggagaaagcaacatttgaaagtcaattaagcactgtaaaattattgattgatattatgtacacatcatcaactaattggaactatgatgagtgttttgaaatttttatagattatttaaataagtggagtgaatacaatcccagcattctagaatggcgtaaagatgaagaaaatttagacgatgtattagacttatatgctaaaaaaactgagtatcttaaggaaaagggtttagttcaaatatctagaatatttctaattgataaagatattgttttatcaaaggtaattaagagagcaactagttatttgtcttgtgaaccttgggaaatcttttcgtatatggaaagcatgatatcaattgataatggtgaaaattgtagtagattgttagagtggtgttgtagagaagaaattaaaaatgtacacgtaaactccagtgatagaaaatataaagaagataaaaagaatatgttttccacagaagaaagtatagctttttatttgattaaaatgttaggacatatggaaaaagaaaaacgttggtatgcggtacatgctatatataacttatataaattagatcagggacaaattatcaatcttattgtaaaatatatttttggagatatgcctaaattatatagtgatgaacaatatttttatttcaaagacagtgcaattgtatatttgttggtagctctaagaagaattgtagaggaagatactttatttttagagaaatattctcctgttctaaaggagatagctttaactagcagaacaattaatgttttacaaagagagttggctagagagattttagctattataaagcctctatcaaaagaaatacaaacagcatgtgatgtagttagcaaagaaaaagtacaagttaaaagaagatatcttcatgataaagaaaataaaggaactaattttagatttgatactatggatattgtacctaaagtatattattttctcgggcaaatttttcaaaaagctgaaggagagattatggaggattgcgataagttaatttcttcttggggtattactaatgagatgatacaagaatggaataaaaaatataaaacatatgaataccaaagaaaatcatatggattaaatacagaagttgaagatttgtcaaaatatgtacaatacaatgcaatgtattatgtagcagatgagtatagaaaaactttatctgttacagatgatgaatatccaatatatacgtttgagacttgggtgaaaagctggttaactaagatacctggaaggtggacttcagatataaaaacattacctcccaataaaaaaatatttttagataccaaacaatatgttaaagatggaaaatatataatagatgataatgtttttaatgatgcattttggtatatttatcaaaataaaaaataccttattctttatagtaatacttccatagaatatgaacatagtgggaagcattatagtatatctgttggaataatggataaaaagtatataaataggcttttaaaacaagctgaaagggataattattggattgaggaaaattttatatctcatgacgatgataactatgaatttattgaggatgtaacaggtgaaagttatgaaaaagaaagtgaatttgaaacgtttgatccatatactaataaaatgaaatataactttttaaaaccaaatgaagatatagagcacttttttaatttggttgatgtattatcggtagattacagcattacaaaagatgaaagttatccaattaaagctcagtattggtcatattcaaatagcgagagagtatataacagactttcagagggtgaaatgctatttattcaaaaggaagcatttattgaatatttgagttcaaaatcaagtaaagttgtagttgcgcaaattgatgtaagatattcggatggttataaagaatatggtgaaaaggcagaggaaacggagagacgtaagatttttatattggatagctgcttagataatgtacttgaagagatagaagttaagattaacaatagatactgattatatataaatgtttgatctatagcttagtaaaaataacttttatattttagaaaattaaccgaagttttaagtttcaccatatgagctatagagtatctcttgataagaaatttgagaactataaaatgcattataaaaaataattcaggaagaagattgatttcatgaaaaaaaatgttgttttacaggaaataattgatttttatttacaatcaaaagattttaacggattaccaatttatcaaatgaataactatgataaagaagaactgcttaatctcattgataatgatttgatagaggctatatcggaaaaagaggtattaaatccacacattcgaggatttaatctagatattcctaaagatatacagaaaaataatgcttcagatctagaaagtcatacttgcttttatccaactgaaaaagcattggaaggagtaaaaattgattataaaagtccttataccatattaatgcaaaaagggagagaacagtttgacattatattttttgatatagaaattttggaaaggtatataaataatcctaaatttttgataatggataatggatatagaggttcaatatgtattcgtgatgagtattatgatgatgaagatgatagcgagtatataaaagattatggtatggcatatattgaaggtgaaaaactaacaagagcagtagcaatatttttaatagatttggctaaattatctcccaaaatacaaatgttgtggaaagcatttgaattaaagaatcagaataggtgtaaagtaaattctggatttataaaaaatttgatatatggagaatgggtgatagattattggatatttcatgcaattatagatgaaatgattattattaataagcaatgtgagtctatggaaattcctccattattctcacatacttatggtactcattttttcgaaatgccagagggatatagaaatatatttttaccaacaatgaaaaattattatgattttgtattagtgttagaaaaaatgtttgttcataatatatctgttaaaacatttcaaaaagatggatttttaattaaaggtattgaaagaaaagatagtaaaggatatgataaaggcagcttagttatgcttagtgagtggcttaatagaaatatcaaaactagtattaatattgatgagattatcattaatccattaaaaagtattagaaagataagacaagttcccgcacatgagcttacaagtaataagtatgatattgatgtatataaaaagcagaatgatttggttatagaaacatatagagcaattagaggaataagacttttattttcaaatcacccaaaagctaataaaatcgaaattccagaatggttagtgactggtgaaaatatagtgtgttattaggttttgttagtgggctattttagaagcagaggctttgataattaaatatgtactagaaattaagagatattgtttttagtataatatctctttaatattatttttttacgtcacggttttcactgtgacgttttttatatctatcaaaaatggaaggaggattttatatgaaaagatattatgttcgttcacctactgataaagcaatagagttatttatcaatcaaagcaaaattaaaagaagagaggtaaaagaatatggaattaaaatatgtaatcccaaacatggaaaagacatttggaaacttagagtatgctggtgaaggtaatattgaacagagaagggtaaatgggcataatacaattttatcacgtagctacaatttatattcagacatccaaagggcagatgatattgttgttattcttccagcagaagcaggtgaaaagcattttgaagttgaaaaaagagtaaagctaattaatccacgaattaccgcagaaggttataaaattggaactcgtggatttacaaattatattcttcatgcagatgacatggtagaagcataagaaaggaaggtaagtttatatgagattagcaaatggaattgttattgatgtggctacaaatgatgaattaatagaagttaaaaattctactacatctatccatcttgaacagttagacaaatatgcaaataaaacaaataagaatttttttaattacagtagcaaaaaagtaataatatatatagacaaacctatggatataagtaataataatactgtaaaattgatagaaaagattaagaataaaggaataacagttgtaaattcattagatgaattaaaggggaaattaaaataaatgggattatcaggagtaatactaaaagatagaaggaattattcaccggaagaacttttaagagatgcagtgacatctgcatttagggctgaccttaatttaatgctttcggaatgtgataggtatgataaaactacgggggattttaaatacgcacaatttaacatatcggttggaaattttgatagtgattacgaaaaagatcaatttatatttgaaatatttcctttagataatgattttgtaaatgatgatagagatacaacgtttgaagatatagattcaactcaaaaactttataatgtggcagttatagaaaaggtttcacaaaacgaaaattcaatatttaaatttgcctatgaatatcttaaattaaatcccaaagattatatttggtttgaggatgattttgcatttgattttcaggatatggaaagattaagtaagttaccattcgatgaaaattggtgctataaaaatccgaagaatttactataatatcagttataaaattttttaaaagagtaaggagttatataaatcttactcttttttgcgagttgtagaaattgcaaaacaaaaattagatgatttttctggaacattgagagatttgcaagggaatctagctccgaaacaatccggaggatattggaatcatcttcaggaaatgaaaaattcatatgttggactaaaaagagcacaaagtactttagaaggttctttaaaaaatccaaatttaccatcacatactaaagagtttattcaaagtaagtatgaaactacaacaaaatatttacagagaatagaagaactatttaaagcatatggaggtattaattaatgaatgaaccaatatttaaattaaaaaatattaatattaaaattaaagatataaagcaagagtgttcgttagataagtggtttagtgatatattacaaaaaaagttagtgaattgaatcttttagatatttcaagaatgctccgtcaggaaatttatccagatattgcagtaccaatggcttggaaaattttaaaggagaatccattcgaaggagaaatgtatgatggacaattattggaattacttgtgagacacttaatgaatagccaagaaaaaaaagatgagattgattatattaattttaaagatacagtatattataaaatcgataaatatgattgggaaactcaagatgatataaaggcttataaagtgttactagataaactagatttaatatttaaaaataaagattaatgtattttactacaacgagtctaaaaaaataaaatggtggcataaataaatttgccaccattttgctatctgtttatgcctctaattaaaatttaatatattttgttttattttttagtttcaaaataaggataaaaaataccttgcttaatcgcttgtaatcttgtaaaataatttgatacaaaggttccttaaagtatttaataatagcagatataaaatctgtgacattcttttaaaggagatttaaagtatgagaaacggacaagaaaaaattctaaaggttaatgaaggtctaacagatagttccgagggtatgaaggataaattacgtacatatatttttataggaaccattgtatatacaattttaatattgtatttcatgttctttgggtttaatagaatagaaggtagaagtgcatataatcattatacgtttattcttgtcccagaaggaatccccttaagatttccaaaactcaccatgtcatggttatacgattttgggaacatcgctgcttttattccttttggaatagtgattccattgttgtatcgtgtacgttttagaaagtttatagcattatttatatcagtgattttatttttagaagtgttgcaatctttaactttcatgggtacgtttgatattatggacgtaatatctaatacattaggcgcaatgataggatttgtgggatatagagtaggattttcttctaagcttaaatttaaaaaacttgttgtatcagtagcatctatgcttattataatcgttggagttatggttgtttctgaaacaattgattatggtgtaaatgttaataaaagaatagcacctattcaagcattaaatgaaataaatacaaaaacaccaataactaagaattttagagcttttaccgtgcaaggtgaaaaagtacagcccaaatttaatttgtttagcagcaaggatggaattggtaaggagtatttatttaatttaggtaagaaaaatctatggttctatgccaagtgtggtattccagacaatgaagaatataaaggttcggttaagattgtgatcaatggtcaagagtggtttcaatttaatgataaagacgaagataaacatatatgcaaagtaaagacgttttttgaaggggaagcagaagatgttaaaattataattactggaaacgctaaagtatgggatgttagtatcggagaaataaagcattggtgggagtgattacgaaaaagatcaattcatattcgaaatattttctttagataatgattttgcatttagttttcaggatatagaaagattaattaagttaccattcggtgaaaattggtgttataaaaatccaaagaatttactataatatcatttataaaacttttaaaagagtaaggatttagataaaccttactctttttgcgagttatagaagcttcaaaacaaaaattagatgatttatctaagatagtatttgatggaaagagtgttgaatggatggaatattgataagttcattataagtattaaaaagaatccaactgttgatgaatatgcaaaaaatcgattaaaattcaaaggatatattgatggcgaaacaggggagattacaaactttttttccacactaaattgtatggaggtaaatgatgataataactaataaagaagatataaataagtatattaaatattacaatgtaacttcttctaattatatttaatcaattaaaagaagttactgagaaagaaattttggtaagtcgtacgctgagttagctattacttatgaaagaagattcactgaataaaaaattcaattaagaccgttaattataaaattttgatttgattcatcacagaaatcaaaagattgctttggaagttgaatataattttgttttttcgcaaagttcttcagtgttgaaaaaatttaaaattcatgtataatgtaaatatactaaaatataaatatgaaaaatataaatgtaaaggtgttgtaaatatgcgcaaagaggtagtttttaattaaactaactgaataaggattattttaaaaagtatgtgaaaaaaatcttgaatagctcaaggtttatttgtgtactcaaaaataatcaatattataatgagcatgttacatctttatttgcaaaatagcaaaaccgtgttctagacacggtttttttgggtctatttttgctacatttatagatatgatataatgctttaatttgcataatttagtcataagttatataaattaaagttctatatttcatgtttatatttaggttatatgattatgaggttgtaagtgaattcgttcatttacggccttttttatttaaggagattattatgataatttgtatatttaaatataaaccttatgaagaaaaaacaaattttttaagaaatattaggatggtgatgactaatggttaataaaccttcagcatataaaatttatttattattttcagctattacagcaatgggtttttcattggtatccacagttatgatagtgtaccatattgaaaatgttcatttaaatccacttcagcttatacttgttgggaccactttagaagcagcatgttttttatttgaaattcctacaggtatagttgcagacgtttatagtcgtaaattatctattgttattggtacagttttaacgggattaggatttattttagaaggttctatttctagttttattttcgtacttgcagcacaaattgtatggggattaggttctacttttataagtggatctgttgaagcatggatagccgaagaagagaatactaaagagttgaatcaaatttatataaagggagcacaagtaggacagatagggtcagtcatcggaatagtactaagtactataatagctaatttttcagtaagactacctatgatagttggtggggtcttatttgtgattttttcaatatttttagcgatatatatgacagaaaataattttaaaccatctgctccggaaggtttaaatacttttaaaaagatgggatatacctttaaatctggtcttgatattataaaacgtaaagctatggttatgattttgctttctgtaactttattttatggattgtctagtgaaggttatgatagactttctaatgcacactttttacaagacactatacttcctaggctttggaaccttaaaccagtaacttggtttggaatttttggagtattaggaatgatattgagtgttatagcaatgcgccttatggaaaataagcttaggaatgattataaaaataagaatggaaagctgctgttgtatataaatgtattttatatattatttatgttggtatttgctattacaaggaactttggtttaatgttaatagcttatttagcaacaaatacacttagaactataaatgagcctatattcagtgcatggttaaatggtcatatagatgataaggctagagctactatactttctataaatggacaaataaatgccttaggtcaaattttaggcggaccaattataggaataatagctacaaatatatcaataagtatcggtatagcgtgtacttcattattattaacaccagtattagtgctatatgttatttcaatgataatggataaaaaaatcgctaataaagttggaggtggtgggaactatgaagaaaataattaatataggtattgttgcccacgtagatgcaggaaaaactactataacagaaaacttattatattacagtggcgctataaaatcagttggaagtgtcgattcaggtaacacacaaacagattccatggagcttgaacgtaagagaggaattactattaaatcatcaaccatatccttcaattggaatgatgttaaaataaatattattgatactccagggcatgtagattttatttcagaagttgaacgttcactaagtgttttagatggagcgataatagttatatctggagtagagggaattcaatcgcaaacaagaatattatttaacacattaaaggagttaaacattccaacaataatttttgtgaataagttggatagaattggagcagatttcaataaagtatttgaagagataaaaaagaatatatcaaatagagtagttagactacaagaagcatatgatatgggaagtaaagatgtttatataagaaatttatccgatatatgtccgataaataatgatgcagttgatgttatatcagatttagatgaagtttttttagaaagatatataagtggagtagaacctaataaagaagaagtacaagaaaaactttccttatacgcaagagaaggaagcttatatccagtattttgtggtgccgcagcaattggacttggcattggagatttattagatggaatttgtagttatctcccatttgcaggggatgagtgtgaagggaatttatcaggagtagtgtttaaaattgaaagaacaagcactaatgaaaaaaaggtttatgtaaggttatttggaggaagagtatctgtaagagatagaattcaagtacctagtaaggagatagtagaaaaagtaaagaaaattaatagtttagaaaatggtagaattattgagacacaaagtatagaagcaggggatataggaattttatatggacttacagatttccaagttggagatgttattggggtttcaaataataaaattaaaaatatatctatagctaaaccaacgttaaaaacaacgatttctgcaattgataaagaagaaaatcaagagctatttaaagcattaacattacttgcagaggaagatccattattagaattagagatgaatgatattgatgaggagatttatgttaacttattcggcgaagttcagatggaaatattaagttctatattagatggtttatatggaataaaagtagaattttctaatattcagactatctataaggaaaaacctaaaggtgttgggatgtcaataatgcgtatgcaggaagatttaaatcctttctgggcaacagtagcattgaaaatagaaccaaaagggagaggtgaagggcttaggtatatttctaatgtttcggtaggatcattaccaaaatcttttcaaaatgcaattgaagaagcagttgttaagacaagtaaacaaggattatttggatgggaggttacggatgcaaaagttacacttacctgcggtgaattttttagtccagctagcactccgtcagattttagaaatgtgacacccatggtattcatggaagcattatatagagcgcaaactgttttattagagccattatatgagtttgagttaagaattcctcaagatgttttaagtaaagcaatttgggatttagaaacaatgagggcgatctttgatagtcctattgttataggggatgaattttcaataaggggactaattccagtagagaattctaaagaatataaaatgaaaatagcttcatacacaaaaggtaaaggaatgtttacaacaaaattttatggctataaggaagtctcagctaaatttgcaaaagcacgtccaaagacaacgtatgatccattaaataaaaaagagtatttgctttataaattaaacgcaattagagactaaattttaaataattatattttatatgttccctcaaactaatggtttgagggaatttcgtttattaaaaagcatgtttaggttttataacaagaatggagagaaaaggaaagtttaaaaatgtccacaaataaaggatttaccggcacctgacttttcttactcaacttaacatacaatcgaacgggtatattgactttatgtccgtatcacccgctcaaatataccatttgtctacagtctgaaagcgttatttctaagactcgaaacacttgtgaataaattttacatatggtagtattttgttaaaaggaggaatcaatatgcataatcatacttatttccaagaacgtatcgacaggttggcaatgctgtatatggaacatcattatgatattaaatcaatgccaattgaagaatttgtaaagacattcgataacatttgcaatgaaataaccgattttcttaactcttctaaataattgtcaattcctcctaataatatgtaaaacatattgtgattaccattaattggtgtgaatattactgttatcaaattaattacgtttgctgcaaaattttttgaattattcaaatatgttaagatgtacttttgtactattattttcagctttacttgcaaatatatgtaggtgctatatcctagtaattataattagattaacaaataaagtgacaaaaatctaaaaacatatatgaaacgcataagtttttaagttgaactggtcttactatatttttgaaatgaaagggtgatatcatatgaaatttaaaactgttggcaatcctaatggacctaagatattacttatacatcctatgtttgcaacttcagaatgttttgttaatttagtagagtatttaaaagaagactattttgtaattaccccaactttagatggacatgacataaatgaaaattctatatttttatcagttgaagacgaagggaataaagtgcttgcttatttgaaggataatagtattaaagaattagattttatgttggggacatccttaggtgctatcattgcatttgaaatatataaaagaaatgaaattcgtataaataaggtatatttggacggaggaccattctttaaatttggagcattattacagaaagttgcagcaaaaaaattttgtaatatttgtagtgaggtacgacaaaaccctcaaaaggctattaacaaaatagaaaggttatttaaaggactaggcaatgaaatgtgtgaggtagcttgccatataacagaagaaagcattaaaaatttggcacatgcttgctatagttttacattacctaatttaaagccagtagaacagaaatctgttgttttcctatatgggactaaagaaccagcacgtttttgtatttttagattgagaaaatataaatatagtcgtattattaaaaaaaatggttttagtcattgtggttatctattatcttatcccaaagagtatgcagaaatgcttaaggagaatactcaataaaaatgcggatttgaaaaaagcaaaaaacgtagcatgtattccaatttgagttctacatgccacgctccttaaataatcttcgaaaaatgtccggcatacaattttctgtattttgtaggtgtcatatcataatgttttttaaatagacggctgaaataattattattgtcaaatccgcattttattgcaatttctgtaatgtttaaatccgtttgctttaggtaattagttgatttatataatctaattccatttatgtaatccgtagtagttttaccagtcatttgcttaaaggttctgcaaaaatgatgtgtagagaaattgacgcaatctgcaagttcatttagagtaagcttttcagtatatttttcttcaattaaacgaaatacacactgaaatttatttaaaatacgttttctttcctcaaattcattttcatttagtatcttatctacgtatcctctcaataaatagacaattagttgataaatattggcttttacagcaagctcatatccaatatttttgctggaatattcttttaatatggttttaatacattctagaatctgcaaatcattttcaattagatttttaaaggtaatacgatttaatgctaaaggagcaagatatttggtttgcagtaaatcttctttattactaaaaaggaaagtaggttcaatacgaattgtataaaattttaaattgtttgaatggctttctaaatagtgtagttcattactatttataatagcaatactcccggttgttacatcaaacttattttgtgcgcattcaaggtaggctgtgccagcagtaaaataataaatctgtaaatgttcatgccaatgccttttgaaattttcaccatttaatatgtcgtctttaaaaaatatatctacaaaacaatcttcttttttactttttctatcaaaataagtacttttatcattcataaatttacctcaaatcaatattgtgctaataataagcaacacagttcttttaaatactggtatataagaatattatatggaatgtaataagcattgtaaatagcgaaatagtgctaagtatttttaagatggagggtaaaaatgaaaaaagattatttaagaaatgacaataaacaaagaaatattgttttacttgttgttattgctatgacatttatggctaccttagattccagcatagtaaatgtggcactgccagtgttgtctagtaaactgaatgtgccactagcgtctattgaatggatagtcacaagttattcaattgttatatgttcaacattactatttttcggaagacttggcgatattattggaaaaacaaaggtatttcaagtcggtaccatagtatttactattgcgtctatgctatgtggatttagcagttcttttatcttacttattgtatgccgatttattcaaggaataggtgcttctgcctatatggcaaataatcatggtattataactgaattatttgaaaaagaaaagagaggtaaggcattaggtatattagttactgctgttgctatcggaaatatgcttggtccatcagtcggaggagtaattttatctttattaaattggaatgctattttcttcattaatgttccaattggtattattgtttttattttaggaattaaatttcttccagtaagtaaaagaaatcctgaaagaatggataaaaaaggtgcgttacttcaatttttaggaaccacattattatttggttcattaattgcttcacaacaaataggattttttaatccttatatgatggtaggaattttgtttgcttttatttttattatatggtttttaatgttagagaggaaacagaaacagccactgcttgaccttacaatttttaagaatatgcaattctcattgaatctactttgtgcacttacatcatttgtttgtattgcagcttcaagcattttgattcctttttatttgcaaaatacattaaaactttcaccaattcaagcaggaatttttatgatgttatctccgtttatactagcggttttttctccgatttttgggagtatttctgacaaggttgaatctgaaaaaattattttaattggtttatttgtaatgagtgtaggctttttcttaatgtcaagactttcggaacattctcttattgttttttgtgctatttttatttctacaatggcagttggacaggcgctgttccaaccagctaataatgccttaattatgtccacttgttctaaaaataagcttggaatagtaggaagcgtaaattcgcttgtacgaaatttaggacagatagtaggaatcactctttctacaactttgctttatagttttatgagctataaaatagggtaccgagtttatgattacattaaaggtaaagattttgtatttgtgtatggaatgagaaacgtttatcttatacttgtagttctttgtttacttggtgcgttactaacagccttaagaattttcaaaacagctaaaagtagaaatattaaaaattaaaattagttttacatgtggtaaaatttgtaatgatttgatataattaaatacaagatttgtgataaataatcaatatttaaattattgggccatgataggaaaagagcgggatgtaataatgaataagaactataaaaaaatagtaatattcatattgttaatttttactgttgtttttattttaattaacctaaaagtacttgaaggaaatggtggagagaattctgcaagacaaataggaagcagaaaaaaatttggagctacctatatgacaactaataataggttctacgaaataattaacgatgaaatacgttcggttgtagagagcaatggagatatattagtaacaagggatgcagctttagataagaacaagcagatgcagcagatttatgagtttattaaattaaaggttaaagctatttttataaatcctgtagattggaaacaaataaagccagcattaatagcagctaaaaatgcagggatacctgttattgtcgttgatacacctgtttatgatgataagctagttgcatgtacagtaatatctgataattatgatgctggagttcaatgtgcaaaatatcttatgaaatcaaaatcgaaagctaatattatgttaattgaacactctaaagcgaaatctggtattgatagaattaaaggatttgtggatactattggggctagtaaacaatataaaatagttgctgctggagatagtgaaggacaactagataaaactatgtctttagtggatgatttgattaaaaagcatactaatgtagatgcaattatggcattaaatgatccaagtgctcttggtgcgttagcggcgcttaaagaaaatggactattaggcaaagttatggtatttggagttgatggttcgcctgaagctaagacaatgattcatgatggatttatgactgctacttctgctcagttccctaataaaattggacatatagcggctgagaaagcttatgatattttaaagggaaaaaggctaaaaagagatgtaattgttcctataagtttaatatcaaaagaaaatcttcttaagtatgaaataagtggatggaagtaagggatggaagatggaatcagataggaatctaaattatattaacttgtttatgatttttgtaaaccttatcattatagtttttacttcagaaattatgactataactttatataaaattagttctgaatttatggcaagagattttttagaccaaattacagttataccttggaaaccacaaaatataactatagtgtctataggcgcttatataatattaatcatactaattacggtaaaaaagaaatatgcaaaattcctaaacaagtgggaaatagctgctttattattatgtgagattttttttagtgttgcaataatgacggcattgaatatgagttataatggaatcatactgtttattattgctgatttagtaacaaacaccaaagataaaagtaacaaaattatatttttgattcttatgataattatatatatatttagtgtttatgatttcatatcacttaaaataaagatggtttcttttgaaaattttctttactactatactgctaacagacgaagctatttaatggagttaaagagtatattgaattctataaatattatagtatttatattgtatatgattgtgtttattcaagttcaaatgagagaaaatgaaaagattacttcattaaacaaaaaactaaatttagctaatgaaaaattagaggttatgaatgtacaattaaaagagtatgctgtaaagataggatcaatggctgagactagagaacgtaatcgtatggctagagaaattcatgataccttgggtcatgcacttacaggaatatcggtggggattgatgcttgcttaacaacaatagacgtttctaaagagttaactaaaaagcagttgaatataattgcagatgtagcaagagaagctattaaagatgtaaggcgttccgtaaaaaaacttcgaccagatgcactggaaaattctagtttgcaagatgcattaaataatatgatttcacgcataagtaaggctacaaaaacaaaagtttttttaaatgccaatataaaattattgaaatttggtcatgatgaagaggacactatttatagaattatacaagagggaataacaaattcaattcgtcacggacaagctgaagaaatttatatagatatgataaggagggataaacaattaaatataacaataagagataatggcaagggatgtgctaatgtagaagagggctttggattaagacatatagaggaaagagttaagttattaaatggaactgtagaatatgatggcagcgatagttttttaataactgtaaatattccaattagatggggagatggaagttgattaaagtattaattgctgatgatcaagagctaattaggcaaagcttaaaaattgttttaagtgcgaataaggatattgaaatcgttggaactgcatgtaatggaaacgaagtagttgaatcagtacgtaagtataaacctgatgtaatattaatggatgttcgtatgccagaaatggatggggttcagtgtacaaaagttataaaagaatcctatccaaacattaaaattatagtgcttactacttttgatgatgatgaatatatatttaatgctttaaaatatggagctagcggatatttacttaagggtgtttctatggatgaacttgtaagggcaattcacactgttgtaaatggaggagcaatgataaatccagatataacggctaaagtgtttaagctattttctcaaatggctcagggggatatttctattcaggctggtactaaaaagaatacagatgatatatgtgatgcagaatggaatataataaagtgcgtaggttttggtttatcaaataaagagattgcaaaaaaactcagattatcagaaggaactgttaggaattatttaagtaatatattaaataaacttaattttagagatagaacacaattggctatttgggcagttcagactggggttataagaaaaatggtgacgcaaaaatgaattttaaaaagcataataaatttataatagcagctattttaattgtaattatagcaggaggttcttttttgtgtataaagttttttatggaaagaaaagatgcagtattgactgttggaatagtctctggaagttggaatactcctagtgaaaatacttataaaattttaaatgatgatatactaaagtttgaaaaaagtcatccaggtgtaaaaataaaatatacaagtggaatattaaaagaggatttttcagagtggatttcacaaaaaattcttttaggcaaagaacctgatgtatttatgatattgcctgatgattttaatgtattttcttcaaccagggcattaaaaaatttagataaactaattaagaacgataaagattttaatagtagcaaatattataaagcagcttacgaatctggaaagtatgataaaagtcagtttgcacttccttatgaaagcgtgccaacattaatgtttgtaaataagacacttttatataaagagggcattcctgttcctaataataattggacatgggatgatttttataaaatttgtgaaaaagtcacgaaggatacagataaggatggagttattgatcagtttggatgttatgattatacttggaaagatgcggtatactctaatggaataaagttatttaatggatctggaacggaatcatattttggagatgcaagggtggagcaagctgtaaattttgttgaaaagttaaattctttgaataatggttatcaggtgacttcacaaatatttgatatgggaaaagtagcatttcgtccactatcattttcagagtatagaacatataaaccatatccttggagcataaagaaatattcgaattttgaatgggattgcattaaattgccatccggtccaaatggaaaaagtgtttcacaattaagtactttgcttatggggataagtagtcgtacaaagcatgaaaagctttcttgggaatttttaaagtcattaacctataatgaagaaacgcagaaaaatgtttttaaatattcagagggaatttcaccaataaaaagtgtaatagagtctcccaaaaatattgaagaaataaataaaagtatgccttcaggaagttctttaaatatgaaaattcttgataatattatggacagttcagtagttactcctaaatttaaaaaatataactctgttatgcttaaagcagataatgatattaacaacgtaataaatggaaaagaaaatttagatacagctcttttgatcttgcaaagagagataaataatatgctgacaaattgaataagcactcaaatttaagtgttgtcgtactaaaaagtattcaagtgtaattttaaaaaattacgcatgaaataatagtacggcaattctttttttgttaaaaatataagaaaattacaaatgtcatataggaaattacatttgtaatgaggtattaatgacaaattataggtgcctataaattaaaatattattaaaattaaagatgtaaacgttcgttagcgctgatgaggttagttgaatttaaaaattacgcatataagttgttgcttaactatatttaggctaggaggggaaagatgagatatgtaatattagtaagtcatggacaatttgcatcaggactttataatgcattgtcaatgcttgcaggtaaagacagaaatgatgtaatatttcaaggattagaggacggaatgagtactgataaatttggagaagaatttaatacagctattgaaaacgttacaagtaaagacgagattattcttttcggagatattattggtggatctcctttgactacagcagtaaatatattagctagtaaagaaatgttatcgaaagcttttgtccttggaggaatgaatttacccgttgtattaacagcaattttgatgaaggattctatggggatagaagagctaaagaaaatgttatttgaaacagcagaggagtcaataaaagaatttaaagttgtagatacagataaggaagatgatatttaggagggataaaaatgtcagtttcatttttaagaatagatgacagaatgatacacggacaaacatgtacaaggtgggctttagagtatccatgtgatggtataatagctgttaatgatgcggcagctaataatcctgtattaaaagcagcttacaaaagtgctagtggcaaaaaaacatttgtatggacatatgaacattggaaattaaaatgcgatacagttttgaaaagtagtactagatattttgtaattacaaaagaacctattattatgtctaagattttggtggatgataaatttaatcctggtattaaagaggttattgtaggaccatgcaatgataggccgggaacagtaaaattgggaaataatcaatctataaatcaaaaggaagcagaagcttttgaacgtattatgcaagccggctataatgtggaatttgctcttcttaaagaagaagcaataggcaattggaaaaagtttagagggcaatttggatttaaatagtttttaataatatattaggggggaaaataactatggggataagtttgattcaggcagctatatttggattatttgcatgcctatcaagtatgcccggtatgggaggaactacctttggtaactataccttaggaagacctttagtagcaggtttgctagttggaattgttttaggagacgtacaaactggtattatagttggggcagcaattcaagttgtttatattgcactggttactccaggtggcactgtatctgctgatgtacgtgcagttagttatattggtattcctctagctgtagtagcaattaagggaatgggtttaaatccaagttctgcacaggcaactcaaatggcaactgcattaggggcagcagttggaaccttggggactgttttattttatggaacagcaactataaacttgatatggcagcatataggctggaaatcaatagaaaaaggtgattttaaaaagctttatttagttaatatgggattgccatgggtttctcacattatttgtagttttattccagcatttattattacaagaatgggttctagcatggttaaaattatgaaggtagcattgccaatgaatggtataccaatgaaaactttatttacagtaggaagtttgcttccagcagtaggaattgcaatattattaaaacaggttgtattaaaaccaagtgattttataaccttctttttaggttttactttggcagcagttatgaaagttaacttgattggagcagcaataataggtattttctttgcaataattaattatagaattagaatgcttcaactagaaaagccatctgcagctaaagcgacgggtaacgatgatgatgaggaggatatataatatggaaaagaaaaaaatatctaaaaaagctttaagtaaatcttttaaaaattggttttatggaaatttaacttgtttttctcaagagcacatgcaaacttttggttatctttgtgcaatgcttccaataattaaagatttatatgaaacaaaagaagaacaaaaggaagctatggaaacttataaagcattttttaatacagaacctcagattggaacattagttgttggtatgacagccggtcttgaagaggcaagagctaatcatgaaaatattgatggtgaaatgataaatggtattcgtgctggacttatggggcctttagcaggcattggagattcattaatagtaggtactttaataccaatacttttaggtatagggttaggactttcaacagggggttctcctctaggagcaatattttatattgtagtgtggaatgctttaatgatttttggaatgagatgggcctattataaaggatatgcgttaggtggtaaagctgttcagatgattgttggagataaagctaatgctgtccgtgaatctgtaattatggttggaactatagtgattggtgcagttgctgctacttgggtaaatattaatacatctttgaaaatgtacaattcacatggtggagtaattataaatttgcaaaaaactttagatggcatttttcctaaaatcctttcagcggcagctgtaatttttgcatggtggcttatgtcaaagaagaaaatatcccctacaatagtaatgttaatctttttgatagtagcttttgtaggtgtgctcttaggattctttaatccaggactatcttattaatttgtatgaggaatcagtatggaagatgaagaaaaaaagcaaatgttttatgaggcaaagcagcaaagtaggctcttaaaaaatttatctaaatggtctagaaatgttatgggattatctagtataggtgttgtaatagcttactatggtttgtcacactctggaataaaatttgcttttggagtttttggtattttatttactgtaatttgtgcttcagcatgctttctaattaatttagcaataaggaacgggagaagaaatgttaatcatattttagagatgattaacagtaagtaagagagctataggtgttatttcaaactaatggtaaaaagtaaggaaatacttttattcaaaaaagacagtagataagcgagtttaactattgaaattcatatgcaccacaatgttcatgaaacaaaattttggtatatatgaatttcaagttttagtttgtcagtatgaggttattaattaagaagacaatgtagagttgtaaaaataaaatcagtgttagtagaatgtatcatttgaaaacgtttttataaaatgaagtaatttaaagtgtaagggggataaatatgagattaaaacagatagctgtgttattgcttagcagtattgttattgttacaggtaataattgggtaaaagcaaacacatcaatatcaagtacttcagcatatagacgtgaggcatatcgtccacaatatcattttacaccagatattggctggatgaatgatccaaatggaatggtttattatcatggagtataccatttattctatcaatataatccatatgatacagtttggggacctatgcattggggacatgctgaaagcaaggacatgataaattggaaacagaaatcgattgctcttgcaccggatacaaatggagatattttttcaggtagtgtagtggtagactggaataatagcagtggactgttcaacaaagtatcagatcatactggtttggttgcattttatacaactaattcagcagtagctagtcaacaatatcagagtatggcgtatagtacagatgatggaagtacctggacaaaatataatggcggtaagccaataatagctcagccagaaaatacgcctgattttagggacccaaaggtatcctgggataatgaacataacaaatgggttatggttcttgcagcaggtaatcaaacacaattttattcttctaacgatttaaaaaattggacaaaaacaggggagtttggagcagaaggtcaagcatctcatgctggtgtttgggaatgcccagacttatatcaaatgactgttagtgggcaaaatataaagaagtgggtgctgtcaataaatttgggttcatctgtaagccctgattcaccgccagctggaggatcaggaatgatgtatgttgttggagattttgatggaagtaaatttattgcggatcctaaatttacagtatcaaataatattggagctagtgatattgttaaagggtactatctacttcctggagatactattaatgtttatgatgccaaggagggtggaaacttgttaggatctgctacagtagaggataatcaatctacggctactgtaaatttgactaaagatttagggaatggtagtggaaaggtatgggtggcaatagtaagaaataaaatagaaaaaaatagacaagagattgattattcttctgaagttgcttcaacaagtactggaacaagtgctgtagcaccttcaggtcaggatattatcaatcctgactttgaaacaggtgatttaacaggatggacagcaacaggaaatgaatggtcaaataagaatgtagtagataataaaacatggggaggaggatctggtaagtatcactgttctggttacagggaccctgcaactggaggtgctggagatcctggaacaggtacattggagtctactgtatttactttaggtggaaatggaagtatcaatttcttagttgcaggtggagatcttccaaaatccgcgtatgttacgttggaagatgctactacccgtaaggaattaactcaatttaatgcatcaggtttaagcacagctaccgttagaagggtaaattgggatgcatcagcataccttggtaaaaagcttagaataaaggtagtagataatgctactggtgcttttggtcatattgatgtagatgattttcatgtatataatacagttccatataaaccacctgtaaatcaattgccttcatatccagtaaattggattgattatggaccagatttttatgcgggagttacctggaatgatactacacaacaaactaatgcaacaacttcagaatatgggaaatatgttccagatggaaggcgtattctgttaggttggatgagtaactgggcatatgcagatagaactcctacaactacttggagaagtgctgattctattccaagagaagaaaaattagtagccacaaatgatggatataaaattactcagcaacctataaaagagctttcaagtattcgaaaaaagccaacaaaaactttaacaaatacaacgataactaaaggaaataccatgtctttagggtcagaaggcatatatgaaattacatcaaaatttaatattaattcaactacctccagtgaattcgggataaatgtaaaagtaggaggaaatcagtatacaactattggctatgataaagcaacgtcaatattatttttaaaccgccataactctagtagtttaaattttctggattatatgccaaataaacaggaagcaccactaaaaccggatgcaaaaggtaatattaagcttcaaattttggtggataaagactctgtagaagttttcggaagcaatgatgataatgcttcagttacaattacggatcaaattttttcagataatttaaacaatggaataaaactatatagcgttggtggaagtactaaagtaaattctctagcaataactcctttaaaatcagcagtatttactccttatataaataatactttgccatataaccctaaaagtgtccaaaaaactcttcctacaagtgattttgagtcaggggttgttccaggcttttggaaacaagccgaaggttatgatacaacatttactgtatcaaattctactagttggtggggtggaacgtacaatcaagacggtaaaagtttccttactacttttggggaaaatggtgatacggcttcaggcatattgaagtctaattactttaaacttagtggagatggaaaaattagcttcttaattggtggaggaaatcatcctacatcagaatatttggctctagtagacggtgttaatggtaataaattattttcagcaacaggtgcagatagtgagacattaagatcagtgacttgggacgcttcaaaatatgtaggaaaagttgtatatttagaaattgcagatgaaagtcaaagtggttggggtcatataaatcttgatgatataaatgtacctcattttaattgcaatattaaaaaatatagaactacaggaacttggggagaaattggaccatatggtatgaaaggctcaagtacctctgctgtttctaatggaatatacatggcttcccaaaatgctagaaacttaagctatgaagctaaggtaagtaatgtaacctctcttagtaaaactaaatcgggggaagcaggattagtatttggagctagtaaaaatttagcaaatgcttatgagtttaatattgatacaagtaaaggagtggctcgtttatttaataaaaagaatggcaaagatttggcacctgaggttaaggaaacattaagtagcgataaatcataccaactaaaagtattaataagtggaacaaacgttaaagcttatttagatggtacaaaaatatttgatgtaaatataacttcttatgctggtagaaatgtaggacttgacgtattagatggatcagcagattttcaagatgtatctttccaaaattagagtaaagattaatttaggaacttatttatctgtaaagtagaccatcaatttaggtataactgctacaaatgaggataatcaattatgatggtctgaacaaacaaaaaaagaaagttcatttattagaaaaggttcctaaacactctaaaactatgcctaattattttaaagcattttttcattaaatgcagcctttgcatatgattatgaagcaagaacaattagcaaaattagtaggggtaagaagagagactatagagcatttagaaaatgaaaaatacaacccatcattaaagttagccatggatattgcgaaagtatttggaaaatcagtggaagaagtatttcaatttgtggatgataatgaaatttagtaaagcatttaaacagatgatttctgaaattaaacttaggaaaaaatctagtagttaaaaagaagctcgttttaaatgagcttcttttagtttggtctgtatttagagaaaaggagtatttatggctttatgcttaataaaattatttcaataataaaatatgaccctttctaagtattgtaatgtaagaactaaagtattaaaatatagttaactgggttatacattaaccaggttaattaaaatattattgaggggtgattttatgtataagaaaagtactgaagaatatataaatgtaattggagctagagaaagaaatttaaaaaatgtgaacgtaaaaattcctaaaagaaagataactattttcactggagtttcgggttcaggaaaatcgtccttggtatttgatactatagcggcagagtctcaaagacaattaaatgaaacttactccagctttataagacatcgattgcctcattatggagagcccaaggtagatgctatagaaaatttatctgtagccattattattgaccaaaagagaattggaggaaattcaaggtcaacagttggaactattacagatatatattcactgttaagacttctattttctcgtataggaaacccttttgttggttattctgatgttttttcatttaacaatattaaagggatgtgtactaagtgtgagggacttggaaaagttgatatgataagtattgataaattattggataaaaataaatcccttaatgaaggagcaatactatttcctacttttgaaccaggaggatggagattaaaaagatatatttattcaggcttttttgacaatgataaaaagataaaagattttacagaagaagaaatggagctccttttatataagtcagatattaaagttactacctctgatcctaattggcctaagacttcactttatgaaggtcttattcctagaatagaaagaagttttttgaaaaaggaggaaggggaagcaattaaatataaaaagcaaatatctaaaattgtcagtagagaaacatgtcctatttgtaagggagcacgattaaataatgatgttcttaagtgtaaaataaataacaaaaatatatgggattgttctgaaatgcaaactatagatttattgaatttcattcgaggtgtctatgatcctaaagggataactatagttaatgaaattgttaatcgtttagagcagttagtttctattggtttaggttatttaagtttaagcagagaaacctcaacgctttctggaggagaatcgcaaagaataaaaatggttcgccaattatccagcagcttaacagatcttacttatatttttgatgaaccgagtgttggcttacatcctcatgatatagataaaataaatatacttttaaaacttttacgggataaaggtaatacagtattaattgtcgagcatgatcctgacatcataaaaattgctgaccatgttgttgatatgggaccaaaagcaggtgtaaatggaggaaaaataatgtatgaggggacattagatggtttattgcagtctaatactcttacaggaaagtacttacataaagggtcacaagttaaaggaaaggttagagaacctaaaggatggttatctttaaaagatgcaaacttacataatcttaaaaatattagtgttaatatccccataggtgttatgacggttgtgactggagtcgcgggttcaggaaaaagtacattaattagtcaggtacttccaaagttttatccaaatacgatttttataagtcagaaaccaatacaagcctcaaaacgatctaatattgctacttttacaggaatatttaatggaataagagaattgttttctaaagctaaccatgttaaaacttctttattcagttttaattcagaaggagcttgcccgaattgtaagggattgggagtaacttatacagatttagcttttatggatactgtgattactacatgtgaagtgtgtcagggacgccgttttacagatgaaattctaacatacaaatttggtggcaaaaatataagtgaagttttgaatatgactgttgaggaagctttagatttttttaatgaaaaagaaatatgtgatatactaaaaaggttagtagatgttggaattacatatattaagcttgggcaatctttgaacactctatctggtggtgagctccaaagggtaaagcttgcatcagaacttgaaagccatggaaatatatatgttttggatgaacctacaacaggacttcatatgtcggatatatcgcagcttataaaggttatcaatcgaattattgataatggcagtactgtaattgtgatagagcacaatctagatgttataagtcaagcagattggattattgatttaggaccttttgctggccaaaatggtggtgaaattatgtttgagggaatcccttcagatttaataaatagtaaaaggtctataacaggaaaatatttaagtaaatatatacagtaaggagaaaatgcttatgcctaaaaaagagctagaagaatattatgttccttttcaatgtatgattataagtaatattaatagctttaatattgatggagtaacaacagcacaatataatacattggatattttagataagcaggggtctaagactacaaaagagctagcagaaattcgaggtatttctcaagcaggaatatctaagttaacaaaaaggttactagaaaaagggtatgttactcaagagcgtagaaaaactgatcgaagaaactatgacattataattactgaaagtggtaaggattttttaattagatcagaaaagtttagaaataaaataatgaacttaattgaaaatactcttacagaaagagaattggattgttttctcaaattatgcaaaaagattactgattcctatgaggaaaaataaatcaacatggtttaaacaatggtgtggatttatgtctgatatagacataaatccattaaaatattaaattattgagcaggtcatttgcaaatcagttaatgctccaaatttttgagaggctgttataaagcatatcagagctaaaagttcagagatttcactatcgctaaattcatttcttagtttattaaaatattcatcattaacaagttgattttttgaaataatatcagctatttcagtggcaattaaaatttttgaatcagttaggtctttagaaggcttacctttagccatacaatattgacatccgttattaaaagcaagggtacgtctcacctcttcctttaattcagaagtaaatgtactgctataaaaaaaacattcctctaaagaagtccatttttccattatgtctttattgtgacctaataattgttgaaatggtgtgtttccttcatttgaaaaagttatttttgccatgttatctctcctctataaatatattttacttacgactaatattatacaaattatattttgaatattgtatttcacgtgaaatataatataatagtaaatatagcaattgaaacaataattcaagaaaggtattgacaaatgaaattagacgaaatagatatattaattttaagggaactacaaaatgatagtaggttatctataagagaattatctaaacatgtaaatctttcaccaccagctgttactgaaagagtgagaaggcttgaagataatgaaattattgaaggatacacaataaaaataaataagaaaaaacttggattacccattgattgtatagtcaaggtaactatgaagaatgggcagtatgaaaaatttaagatatttatcaaagaatataaaagaagtgaatggtgttatagaattgcaggagatggatgttttttagttaaactattagtacaatcactaaatgaaatagaagaatttataaatgatgtatcttcttatgcagtaacagaaactattatagcgctttcggaagtagcaataaataatgatattaataagtttttaaaggagtaagatatgattaaggaattaaaagattctcaaataaaaagaattatggatatttggttagagactaatattactgctcacagctttatagataaagattattgggttaagaattatgatgtagtaaaaaatcaatatatacctatttctcaaactttcatttgtgaagaggatgaacaaataaaagggtttataagcgttattgataattcatttataggagcgttatttgtttcagaagagtatcaaaggcaaggaatagggaaaaaactaatagattattgtaaaagtttatattcaagtttagaattatgtgcctatgtagaaaacatagctgcagtaaatttttatgagcactgtggttttagagtattaggaaagcaaataaatgatgattctggttttgttgagtgcagaatgaaatggacaaaataggataattattaggagaaataatgcttcaaaaacatggaggataaagatgtatgaatcaagagaaaattatttggaaacaattttgatattgcaaagtgaaaatggaagtgtgagatctattgacatagcaaaaaagcttgattttagtaagccaagtgtgagccgtgcagtggctatactgaagaatgataaatatattgatatagacgaaaaaggatatattaagttaacaagtaagggagaggagaaagctaaaagcatatatgaaagacacaggcttttaactaaattttttgttgaaactgcaaaggttgaaaaagctatagcagaagaagatgcatgtagaatagaacatatcataagtgatgaaacttttcaaggaattaaagaatttttaaaagatgtttctaaatagtatttttagtacaaataaaaaattattgataatatatagtgatattgctaagaacatagcttcaaaacagaattacttgtttaatagattctgttttgaagctattttttattagccaagtaaaaatattggaagttatttctgtggtactatagaacatttaatatatttgatgtataatagttagcgtaggctaacttaaatataagaataatatactgcttttactttaaaaaccatagtaggtggacaaattttttatatggacaattgtgaagggaaggtgatatttatgaaagtatatgaatttggaaaaaaagaaaatccagctattatgctattgcccggaacttgctgtcattggaaaaataatttttctaatgtaatagatttattaattgaagatttttttgttgtttgtgtatcatatgatggctttgatgaaacagaaaaatcagaatttcaggacatggtcactgaggtaagaaaaattgaaaattatattaatgagagatttcaagggaagatacatgcagtgtatggttgttctttgggtggatcttttgtaggactaatggtacagagaaagaaaatttacatgaaacatggaattttgggaagctcagatttagatcaggctacaaaaccaatggctttattacaaacgaaagttatggttcccattttatatagcatgttacataaaggtaaggtccccaaatttattgcaaaacagatgttaaagaaaggtggagaaaaatatactaagaatgcactttatatgatggggataaatggcgttagtatgtcctttgttagtaaaagaagtataagaaatcagttttatactgatctggtgacaagattagaaaataatattcaatcaccagaaacaacaattcattgcttttatgcttcaaggatgggagaagaatataaaagcagatataaaaagcattttatgacgccacatattgtagagcatgatttattacatgaagaacttctcctatgcacaccaaaggaatgggctgaggttgtcaaggattgtgtattataaataagagctgtgtaatatttagagttcaatcttaaaaaatatttgctaaggaggaagtactatgaaaatattaatatacggagcaggggttttaggttcttatgctgcttatgagttaaaaagagtaggtcatgaggttactattttagctagatcaagtagatatgaagaattaaaagaaaaaggattagtaattagacattggtttcaaagaaaaacaacaaaaaataaaataaatgtagtgaaagagttactgccagaggaatattatgatgctgtttttatagttatgcagagctcacaaactaatgctatattaccagttattacggcaaatgttaagtgtcctttatttgtgtttgttggtaatcaagataaagcaaaagatataagtgagaaaattaaaagtacatctaaaagcaatccaagagtgctttttggattttttagtattggtggaaggagagaaggtggcaaggtaattagtgtacatactaagcatcctgattttgatattggagatttagaggggagggatgattataaaattattatagaaaaaatatttaaggaaacaagctttaaattgcattatcatgtaaatatggatgatttttttaagactcatattgtagttattatgccgcttgcatatttagcttatatgtcaaattgtgatttgagaaaaatagcttggaataggaaagcactaaatgcagttatcgatgctatgattgaggggcatgaggtattaattaaattgggacacaaggttgatcctgagagtagtgaaaggttattaagaaatcatagaaaagtagcttatttggggttaaaggtatgtgcaatgacacctcttggtaaattaggaataagtgatcattgtaaatcaggttggagggaaatggaatacttggacaagagactattggaatgggctaaaaaatcaaatttagaaacaccgaatataaataagcttagagaacacttaattaagtacgtacataagaaagttatataaaaaacagagggattaagaacctctgcttttatttatactaatttttctttttagatttagatataaagtagataattccaagaactataaaccatacaggtgttacaaataaagctactcgggtttcgctattgagagctaaagtaactataacaaaagcgaaaaatgctaaaattatgtagttagctattggataaagtggcattttaaaattatttttagaagcaagctctggattagccttgcgatatttaatatggcatataactattattgcccaaatgaagataaagcagaacgttgatatgctagtaattagtacaaatacaccttctggcataatatagttaagaataactgcaataaggattacggctgcagaaaatattgtagcattagaaggtattttgtgagaagttaatttcttcattgattcaggtgcattattttcattagcaagagagaaaaccatacggcttgtgctgaatataccactattacaagcagatgcagctgaggttagtacaacaaaatttacaatagttgccgctgctgctactccaactgcagcaaatacttgaacaaatggacttttatctggattaattgaattccatggataaatgctcattataacagcaagtgctcctatatagaaaataatgattctaactggaatattattaatagcttttggaataacatgttctggatcttcagtttcaccagcagttaagccaactaattctattccggtaaaggcaaataccaccatttggaaagaaagaataaaaccatttgatccatttggaaaccagccgccatgcttccaaagatttgtaaagctagcagcgccagcacttgtggaaaaacctttaatgatcataaaaataccaactataattagtgctaaaattgcaacaactttaattaaagcaaaccaaaattccatttcaccaaataatcttactgcggtaaggttcataattaataaaattaacagtattacaaggcttggaacccatctaggcagacttggaatccagtattgtacataaagcccggtggcagttacatcagccatagcaagtgaaatccagcagaaccagtatgtccaaccagtaatgaaggctgctccgtttcctaaataatcttgtacaaagtctacaaatgagtgatagtttaaattagaaactaataattccccaagagcacgcataactaaaaaacaaattgctcctgttatcatgtaagcaaataaaatagatggaccagctaagtgaatagacctgccagaaccgagaaataatccagttccaattgcacctcctatagcaagcagctgaacatgacgattttttagacctcttgataaattttgattttttgattttgtttgatccattttatccctccatcttagtcgagaggcatgtatcaaaaatgccttcttcgctataaatattttatgattggagacacaaatgggaatagataagatatgaattgaagtaatttatcatattacttgtgtaagatattttatctgtcccctgtccttttacctgagagtttcgctttttttatgctttctccttcggtgctctttaagagtctctccaagggttcatccaatagcggtcatctctaattaaatagatacctgaaagatttacttcttcggtgtatggcaaaagccaaagctctcccgctaacttcatctgaacaattaaattttactgttatatattaatatatatttaaagaaaaagcaacaattttttcagtttgttaagaaaaaagtataaaaatgagttttgtgtcattattgaaattctgttcatataaagttgttatatatggctataggcaaaatcaatcctattataataattaccaggttgcgtatttttaaactattaataaaaaaatgctgtactagtaaatttttaaattattagtactgcattttttatatatacttttttagaacaataagagaagaaaagtttaaagttaaaactttttaagaaatagttttatttagaggtcctttgtaatataaattcatattaagtacacaatatattgtaggagaagaaatgaagaggagattgttttgaatagtgatattaaattgcagattatagattatttcaataagaatatgggtacgtatcttgcatcagttagaggccatataaaaattagtttattggcacttatggtatccattgtcattggagtacctttgggatacgcttgtgtaaaatacagaagatatgagaatgctatcttaataatttttcaatcacttaggatagttccaagtttggcaatcttaatacttttaattcctataatggggataggtcttaggcctgcaatgacagcattagtgttattgtctattccacctattttaatgaatacagcatctggtctcgaagaaacgcctgcctttatgcttgagacagcttatggaatgggtatgactgaaaagcaggtattactaaaggttaaatttcctttagctatgcctatgattttaacgggaattaaaacagctatgattgaaattgttgcaagtgctactttatcctctaaaataggtgcaggaggacttggagacattatttttacagggttagcccttaatagaacagatttaattttaattggtggtatttctgttgcggcgttatctattatagcaggagtactgcttaatttcattgatagagctttgctcaaatacaaatatataagaaagtaggaatgtagaaatgaaaaaaagcattaagcgaataatggtaacagctttggctatagtgtttgcagtatctttaacagcttgtgcaggtaaaacaactaaaagtggtgaagataaaagtggaacgattcgcgttggatcaaaagactttaccgaaaatttaattattggagaggtgtatactttagcattaaaaaatgctggctatagggttgaaagggtatcaaatatagctggatcagtaattcatacctccattgtaaataatcaaattgatttatatccagagtatacaggtacaggtctattgtctgtacttaagaaaaaaccgttgacagatccagaaaaagtttataatacagtaaaaaatgactataaaaaacaatttaaaattacgtggctaaattattcgaaagctaatgatggtcaggggcttgttattagaactgatatagcaaaaaagcttggaattacaacaatatcggatttgcagaagcatgcaagtgagcttaggtttgcatctcaaggtgagtttgaccagagagaagatggaattccagctttgactaaggtatatggtgaatttaaatggaagtcgtcaaaaatatatgataatgcattaaaatatcaggtgctaaaaaataatgaagcagatgttgcgccagcttacactacagaagggcagctagtgaatacaaaggaatttacattactaaaagacgataagcaagtatggccaccttataatatagctcctgttgttcgtgataatgttttaaaggcacatcctgatattgcaaacattttaaataagataagttctaagctagatactaagacagttactaaattaaattcgagggttgatgttaataaagaagactatgcaaaggtagctagagagttttataactcaattaagtagtttaattagaggaggataacatgtcttgaaggctatagagttcattaatgtaagtaaaaaatttagcaatgcaaaatacaaggcggtagacaatgttgatttgactatagaggagggagagtttattaccatactaggctcttcaggtagtggaaaaactacgttactaaaaatgattaatcgactatatgaaccggataaaggaagtattgttctcttcaatgaggatattaagaagattgatgtagttaagcttagaagaagtataggatatgtaattcagcaggtagggttatttccgcatatgacaatagcgaataatattgcaacggtacctaaattgctaaaatgggataaaagagaaattgaaaaaagaatagatgaattattgcaccttgttggattagaacctaatgaatttaagaaaaggtatccgtcacagctatcaggcggtcagcagcaaaggattggtcttgctagggccttagcagttgatccaaagataatgctcttagatgagccctttggagctattgatgcaataaatagaatgaaacttcaagatgaacttttgcatattcatggtggattaaaaaagacatttatatttgttacccacgatattaacgaggcttttaaacttggcagtagagtaattattatggataaggggagaatatgccagtttgatacaccaagaaatattgttaaaaatccagcagatgaatttgtatcatcattaatctcatcatcacgaaatcaagaacgcctttgggaggaattagggtgatagaatatgtagtggattattgggataagttaggttgggcccttattgaacacttagagatagtgattattacgcttttgatttcaatttttatagcatcaatattgaccataattgctatatattcgagaatattatcggaaatattaatacacgtattttcagttgtttattccataccaagcttagcgctttttgctatgttaattcctgtgagtggacttggaaagggtacagctataatagttctgatagcctataatcaatatttgttgcttcgaaactttatcgcaggtttaaatgaagtggaaccttctattattgaagcagcaactggtatgggaatgactaacatgcaaatactatttaaaataaggttaccattatctaaaaaggcactttttacgggtgttcgtttgtcagtagtttcaactataggaattgcaactatagctgcgtttattaatgcaggtggtattggcagtgtactatcagatggacttcgtacaatgaacgtatacgagattgtttggggaagcatattagcagcaagcttagcgataggtgtaaatgcaattcttagcaagatggaaaaaataatatagagaatagtgttactttgtctacactttgagggcagcttgggctgctctcatttgtaattaaaacaacattgggtagcataatatcacttcctctatttaattgataattattatcatatgttatagtactatattttgttttagcgagcttaagtgagtgtaatcacattttatattcgcaaatgaaaaatattctcatttacaattttgcattattgtgttattattttctcacggctactggcgccaaattattaccgcatatactataaaaaagtaggaggaataatatggcaaggtttatgggacctagatttaaattagcaagacatttgggggttaatgtttttggacaccctaaggcattaaacagaggtgtaaaacaacacaaactttcggagtatggtgaacagctgttggaaaagcaaaagctgagggcttactacggggttttagaaaagcaatttaaaaaaattgtatttaatgcattaaaatcaaaagaaaagtctgaagatattttggtgcagagtcttgaaagaaggttggacaatctagtttatagattgggatttggttcaactttgagagaggcaagacaaatggtgagtcatggacatattcttgtaaacggacaaaaggtagacataccatcctacaaggtaaatataggggatgaagtatcactaagaagtaagtccagaaagattcaaacttatgcatctaattttactacaataattccagctgtaacttatattgaaaaagatactgaaagtttttcaggtagattaattaggcttccaaagtctgtggaagtacctgttatggtgaaatactccaaggttttggagttctattctaaaaattaaagtggggacaggtcacaattcttactaaaaattgtgatctgtcctcttttatatacgaaaaaagctgttacaaaacttttttttagttttgcaacagcccattcctttaaaatattatttatttgattattttaagccatcccttaggtgcttcaatatgacccatttgaatacctgtcaatgtatcacgtaattttttagtgataggtcccatatctgacattccgcttggaaaacaaatttctttgccatgatctactatctttcctactggtgagataacagcagctgttccacaaagaccgcattctgcaaaatcttttacttcatcaaggtaaacagttctctcctcaatttctagtccaaggtaatcttttgcaactgtcattaaagaacgacgtgtgattgaaggaagaatagtatttgatttcggtgtaacaaccttattatctttagttacaaataggaagttagctccaccagtttcttcaacctttgttctagtagctgcgtctaaatacatattttcatcaaagccttcttcatgtgcagtaacaattgcatgaagactcatagcataattaagcccagctttgatgtgtccagtaccatttggagcagcacgatcaaaatcactaacacgtaaagttaaaggcttaactcctcctttaaagtatggaccaactggtgtagcaaatactctgaattgatattcatctgctggtttaactccaataactggtccagaagcaaacataaatggacgaatataaagtgtagcaccacttccatatggaggtacccattcagaatttgcctctatagtttttacaacagcatctacaaagctttcctttggaaatgcaggcatttctaatcttttacatgaatcttccatacgctgtgcatttaagtcaggacggaaggtaacaatatgtccatcctcagttgtgtaagctttcataccttcaaagcatgcttgagagtattgaagtacacctgcacattcactaatagcaatggtagcatctgaaactaatgcaccatcatcccattttccatctttatagttagatacgaatcttttatctgttttaacgtatccaaagcctagattagcccaatctatatttttcttttccattaattttacaccctttcatgtataataattgctgatttatactccattaaccttatcaataacaatatgtactgaagctgaaggtcaacctcatgatgagtagattaacgctgtatacatcatcttttactttgcaagctggaatataaaaaaagaaattcattactatttctattgtgttttatgaaagttgcttgcccctaaaattactaattgtattaatcgcccccttaatttaattttatattaaaaatgaaaataatcaacggtaatttgtataaaatatgcagaatgttataataaaataaagtttattactaaaaaattataaatttaattaatgggggatgacatattgaaaaaaataagatggggaatattaggacttggaaatattgcaaataagtttgctcaaaccataaaatctatggattcagtggagctttatgctgttgcctcaagaaataaaaagaaagctgaagcctttggaaaagagtatgaggttccttctaagaaatgttatggaagctatgaacagcttgttgaggatgaaagcatagatgttgtatacatttcagtgccacatgtgtttcacaaagaactctcaatactatgcctaaagaatgggaaagctgtactatgcgaaaaacctgtcactatgaatgaaaatgaaattgaagaagtaataagaattgcaaaagaaaacaggttgtttttcatggaagcaatgaaaactcgatttctaccaattaatcagaaaattaaaagcttaattagtgaaggaagaataggagaagttcgtttattgcaagctgattttgggtttaaagcagaattcaatcctgatggaaggttgtttaataaggaattaggtggaggtgccctgctagatgttgggatttataccatatcttatagctcgtttgtttttggaaatcatcctaggagtatcaaaagtaatttttatataggaaaaacaggaatagatgaatgcgtttcaataaatttagtatatgaaagtggaaagcagtctcagctttatgcggccataaatcttgataccacaagaactgctaacattatcggaactaaaggaagaatttgtgtacctaagttttcaaatgctaatagagcttatattttggttgatgggaaagaagaaaaaatagagatgccatttgatataaatggatttgaatatcaggttaaagaggtaaataaatgcattttggagggaaagcttcaaagcgaaattatgagttggaaagactcaattgaaataatgaaaattattgatgatgttaaaaagaacttctaatacttataagttttataacatacactcatagctataaagagttaagggtgtatgttataaacttttatgtagaaaattccaaaagctatttgaagcagatgaatgttttttaagttttgatcttacaaaagccaattcgcttttaattgtaacatctataggaatcactgtaatttttgaatagttaagaagtttaatggagttctgcatcataagtgagactcccataccgttagagataaagtctaaaatattatcaatacgagttcccgtatagcttattttaggctcaaaaccagctttttgacatgtagaataaaacaaactgaaaagctgtgtacttttatcaagttgaaagaaaagctcattttttagttcgaaaatcgaaataatttctttttttgcaagatagtgatttttaggaagaactactgcaaacttatctgactcaacaacgactttttcatatttatctaaagttgcattaaaaatacgagtgtatgcaacatcacaagaaccagcatctaattcttttagtatatttatactttcaacctcttttaaatcaagaagaatgtcaggatatctattgtgaaactttgcaattattcctggtacattataatttgccatgactggaatagcgcatatttttagagtggagaatttagagctttgaaatggaagaattgctctatgaagttcacaatagtctattaggattttttcagcataaggaagtaaggtttttccagcctctgttaatgttatttttttatgctcacgtataaataaaattgtatctaattctttttccaaagccataatttgctttgaaacattgctttgagttgtaaagtttatttctgctgtttcagtaaaatttaaagttttggtcaaatctataaagtatctaaaacgttcgatattcattatgcctccattatttttaactattctaatatggaatagtatagcataaaagctgaattgattttatattttctttgctatagaataaatttaggtaaataaaggacaagctattctactatctttagtgccttttaggagtgtttacacatatctatagtaaattaagatattgactgttttattgattagaaagaatgttttgaaaattattctaaagagaaaataggagagaagaattatgctagctggagtaattattaatgtgctatctgtagtttttggaggtattacaggaacacttgcaggtaaaaaattatcaaaggagtttaaagcaaacttaacacttgttttaggagtttgttcaatgggaatgggcatcagttccattggacttatgaaaaatatgccagctgttgtttttgcagtggttttaggaacagtagttggaattatattaaatcttggaaaatggattaataaagcagcagaagagatgcaaaaacctattgtgaaattatttggaaatcagaactctaatttatctaatgaggagtttatatcaacactagtaacaattattgtgctattttgtgcaagtggaactggtatttatggttcattgacagcagggatgactggggataatacagtattgatttcaaaatctatattagacttttttacagctgctatttttgcatgtaatcttggtttagtggtttctgttgttgcaattccacagttttttattttcttattgttgtttttaggagcaaaagttatttttccacttacaacacaaagtatggtttttgattttaaagcctgcggaggtttccttatgcttgcaacaggctttagaatggttaaactaaaagaatttcccattgcagatatgataccagcaatggtcctagtgatgccatttagttggctgtgggtaaactggattttaccaatgttataaagcagtaaggtataaatctttcaaaatactaattattataagtttctaaatacttagcaccccaatcacacattgaatttattacaggaattatgctttctccaaaattagagagggaatactctgttttaggaggaactacagcataaacagttctgatgattagtccatcactttcaagttcacgcaattgttgtgtaagcatttttggtgttgctttaggaataagtttgtgtaattcattgaaacggagagttttgcctattaagtgaaacaaaataactgctttatattttccaccaattaggcttatagtagcgtctactggacaactaaatgttttaatatctttcattatgtacactcactttctttttgggtagtatgttacaaaaaagtacattcttgattaaataaaaattactgttaaaatgatatcatggattaatttggtgagcaagattaatctataaaaaatcaaataaaagagagaggtaataagaatgaattttttagatatagcaaaaaaaagatattcagttagaaattatacaaaacaaaaagttgaaaaagaaaagctggatttaatattagaagctggacatattgcacctacaggagggaataaacagccacagagattgattgttgtacaagaagaagaggggcttaataagatcggaaaagccgctaatatttatggtgcacagtgtgcaataattgtttgcagcgatgtaaatgaaacttggacgcgtccgtttgacggaaagaagcttacagacattgatgcagcaattgttacagaccatatgatgcttcaagcaacggagcttggactgggaacagtttggatatgttattttaaacctgaggtgctaaggactgaatttaatatacctgataatttagaaccagtcaatattttagctgttggttatagtagtggtgatagtttgtctccagataggcacaataaaactagaaaggcaatttcagaaacggttaaatttgaaagtttataataaaatacggtatttcaacaaaagtcgtagagtaaagtctgcggctttttgttttaaaaacttgttatgcattgtgaattattaggaaaggtattattgatataatcagcttgaattttgtgattatagtcatattaaatatttaattaaaatatcgatactagtattaatgatattttatgtagacaactgtgtaaaataagataaaaaagacattaaatgtctaataaagttgaataaaatatatacaaactggcgtattatatacagtttttttaaaatatcaaattttatcaaagtaggtgtactaatgaaaagaggattgagaaaggaacgaaataaggaagatgaagctggaaagattgtaaatgaaggcaaagcgcatctattttataaagtgataatacttatggtgttttatataagctatggtatctacttgtattggagatttgcatacacaataccaagaggttatggagatatagctttaattgcaggatatgttttatttatcgctgagacaatcggttttttagaatcttcaatgttttatttgacgctttgggatacaaatacgccatcaacgccagaagtgcaggataaagagtttcctcacgttgatatctttattgcaagctataatgaacctaggaatttattatataagactttaataggctgcaaaaatatggactatcctgataaaagcaaggtccatatttatatatgtgatgatggtaaccgtaaagacataaaagaattatgtgagagtttaaaggtaggatatataacgagagaagataatactcatgcgaaggcgggaaaccttaataatgcattaaaacaaacttcatcaccttatgtagttacttttgatgcagatatgattccaatgcatgattttttgcttaaaacaattccattttttatggttgaagataaaattggatttgtacaggttcctcaaaatttttataatgcagacccatttcagtataatttgtttaacgagagtagggttcctaatgaacaaaacctattttctaggttaatacaagcaggaaaaaatagatttaatgcaataatttattctggttctaatactgtattgtcaagagaggccttaaatgaaataaatggactagttgttggaactattacagaggactttgccacaggtatgaagattcaaagtaaaggatataaatgtatataccttaatgaaacacatgcatctggactttcacctgaaagccttgaagatttatatagccagaggatacgctggggaagaggcgtaatacaaacttttaaagcgtttaatcctttatttatgaggggacttaatatttatcaaaaattaatgtactttagtgccttttcgtattggtattttggattatggagattaatattttttatggcaccgatagtattttctgtttttggtgttgttgtattatcaacctcggcaattcaaatgttagaagtatggcttcctatgtttatctttactaatttaactttttatcatttttctaaaaaggtaagaagcgtttcatggactcacatatatgacacaatattatttccacagataacagtgggaattttaaaagaaacatttggatttaaaatgtccaaattcaaggtgactccaaaggaaaatgtaagaagggacaattttacaaatagatttgagcttgttagagttcaaattgttctagctgttctttcgtttgctgggattgtaaggataatatacttatatgttactaacaattttgaagcacaatatataatcaatttattttggcttacttataatttttacttgctagttatggcgattttctttgcctctgaaagacctaaatttagaaataatgaaagaatgtttgtttcagaagaagcctatgtggttaataatgagcagaaactttatggaaaaaccatagatatatctgaaacaggtatatctataaaattagaaaaacctatttgtatagatccaaatgaaaattacagtataggagtaaagacagctagaaattcagctgaattttcaggaaaaatagttagagttgataattttaaagatggtcataaatacgcgtttaacattactgaaattgatgagaaaaacttttcagagttaatactaatactatatgatagagtacctccgtctcctgaaaagcaaaaaagagactatatgactgttaatgtattaagaaatataataaataggaaaaaaaggattgtaccgttaaatagaaaacttccaagagtcaaaattgacaaaaaagtaaaaatattagtttcaaaaaatgaagaaggaatacatgtggtggattttaattacatgtatattgcagttaaatgtgtgcaggaatacgatagttttattcttccattatcagagaaatttaatattaatcttaattgcacctacgataaaacactttctgagagaaatagaaaaaaggtatcgatatacaaggtgacaaattacgatgaatttaaggatcatgatttgctagagttattaaaagctgttcctgtatataacgaagaattgaatatacatgagaaagtagctgctgtgaagtaataaatggttaaaaattttaaaagcacaatatagaaatactttaatttttgcaaaaaataaacatgcatatcaccaggttcactggggaaaataaagttgaggtgatagcatatgaaaaagattggagtagaaagtggattatctgcaatagcagattatctaaagaatgaaggatattcagtagaacttttaggtggaaatcttgagaataatgctgcaaaatgcgatagctttgatgcagttgttacagcagattataataccaacatgatgggattttgcaatacatcaacaaaaactcctattgttaatgccagcggtttgacaagagaagaagtaaaaaatatgattgaacaaaaaacaagtagataatagttaaaagcctcctttgctaaacttcaataagattttattgaaagatagcttaggaggtttatttatattattcttgaaattattctaaaaatatatatacatatagatgttatgagtgggaaaaataaaaaatggatctgaagttgtgattttattaagaagaatataaaaaaaggagatgcttatttatgaagagtaaaccagatgatagaagagataatgttgatagaattcaacaaagcatagacaatacaattgagaacattcatgagacaaatgaaatgattgaaaatactaatagagaaaaaaataaagacgatttaaaggctaaaaattgtagaagagaagcagcactagatgagtttaaatcagaaattaaggatgaagctagggctaaagaaaaaggatacaaataaacattttattttaagaagggtgatttatataaccaccctttatttgttaattaaatccaaatacttttcttgataatgaataacctaatagtataatttttcttccaacaaaacctttaatttgaattagtagtcctaaaaatgatttatttacttcgaagtataattttctgtttttggaatgtaaataagaccaaagttctcgttttttgttaagactctgttctgtattgtcctttattaagagaacagtactaacagtcatcatcattactaagtatttaaccatgtatttgcggagttttttgcagtttaagagcataggattatagcagtcaataagtatttttgttactttgatctgctgatctatacgtttaatcattactttttcattaacggattgatcttctcttccaatgaagtatctgtataaatctacatctaaatagtacattgtttttacatatggaagtggcttgtatacaaaaatattatccacataaaatgtatgtttaggaagatctaagttgcactcacgaagaagctctgtacgataaataactgagtgcattaatatattttggctacttttaagatgtcctaagctgtcccaggtgaatattttttcttttggcattgcacctttataattaatacttctagatttgttaatactgaagttttcatacacataatttgaaataagcatatccagtgatttagagtcttttatcatgttcttcaatacttcaagtaccttttttaaactagctttatcaaaccaatcatcactgtctaaaactttaaagtatactccctttgaatgtttaagaccagtgtttattgcgtcgccgtgaccgccattttctttatgtataacgcgtattgtattaggatattttttttcgtattcgtcagcaataattgaagtattgtccatagaaccgtcgtttacaattaaaatttctaattcctcgtctccaattagcagggattctatggctctgtccatatattcggctgaattgtaacaagggattactacagtaagaactttcatttatacctcctgattgataaatttaaatgctttataaagctgtaaataataagataattgccatgttaattctgccaatattacgcctccgaaaacgtctattataacatgctgctttgttgttaaagttgaaacacatatcataattgctataaataatgacaagtagcgataccagacaggaatagttttacaatttctaattccagcaaaacaataccaactaaccaagcagtggatagatggaaagagattatttgctgcatctacactatacaaaaacttaagcatgtccacaaaaataccagaggaaacaatatgcggtcttatattagttgtgggatatactatatatataataccacatattagtttaccgagtaagtcagccattataaggcggtaacaaacattcttatttactttgctaatcaatatgtaattaataatccaaaatatataacttcccaaataaataacagtaaaaataggtacaactggaattttattatccaaataagatgttaaattgtgaaaaacagcatccttgtaaaatagacgtgcacctgaatacactgaaaaattaaaaattacgcataaaattaaaggtttaatagcatattctggtatgtagttatatattcttttcatcaacctcataatagactcctcttaaaattataaatatatttgtataattgcttagtttacatttaaaaatattcactataatatatattactaaataactttaagtataatgtcttatgttatgtttagtcaagatgctataataaatattaacttaattttatcactaaaaagacaataatttgtatttgtttccgtaatattcatatggaatttattaaatgtttataattatggtggattagtctataatataataagagtattattttattggaggaagctatggaaaatataaaaggtaaaaataatttgtatgagcaatttttaagatattcctactgggaattaaaagagttatttaaaaaagcaaaaacaaaagaagaacaggatttttacatgatgctctccgatatggtattgcaaaaagagcaggagaaggttataggaaagcagtaatggctacatatactatatttgcaggggttaatggtgtaggtaagacctcaatatatgagtccatttattatagagaaaataagaatgagaaaagaataaacacagatgaaatggtagcgaaaataggctcgtggcatgataatgccctccaaattaaatgtgcaagacaagcagtaaggcgtataaattgctatataaggaatgatgtgtcctttaatcaagaaacaacgctttctggtaaaagtattgtaaaacacataaaaaaggctaaacaaagaggattttatataattatgaattttatttgtgtagataatgtacagattgcaaaagagagagttaagcttagagttttaaaaggtggacatggaatagaggaagataccatagaaagacgatattataaatcactagaaaatttaaagaaagtgttccatttatgtaatgaaataaacatatatgataatacagataaatttaaacatatagcgtatgtatgcgatggtgtaattatatggaaaagaagtttcattccagagtggagtagagatattttaaaataaagctggcttgatattagtttattaggctggcttttgttgtatatcaataaatattaatacacaaaatataattgctagagactatattataagggaggagtaaaaattgaaaaataacataattcaaatagataagttagggtttcagtggaaaggacatgatccatttttatactgtatgcaccataaggatgcatatccagaaggcaatgatgagatgggaccaagggtttctttaagtggaagagatcttggcgatgattttagttataaagacggttttagtatgtaccatggtgcttctgttccaggttttccgaagcatcctcatagaggttttgaaactgtgacaattgtgcttaaaggatatgttgatcatgcagattcaagtggtgctttaggtcgttatggagctggtgacgtacagtggctcacatcaggtagaggatgtaaccactctgagatgtttccacttttaaacacagaagaagataatcctttagaattatttcaaatatggctaaacctcccaagtaaagataagtttgtagagcctcactataagatgctttgggctgaggaaattccagttatagagttgaaggatactaataaaaaaataagtactatgcgaattatttcaggttcatataataatattaaaagtttgcagccgtcgccaaactcctgggcaaaggatgaaaataataatgtaaatatatttgttatcagtatggaagctggtgctttacttgaacttcctagaatatcttctacattaaacagaacgctttattattattctggtaatggtataaatatcagtgaaactagtattgacgttttaagcggtgtaagacttaagggagacgaagtcataaaaatagaaaatggattaaaagaaagtaagctgctgcttttagaaggagaaccaataggagagcctgttaaaagttatgggccatttgttatgaatacagaagaagaaattgaagaagctttttctgattacagggaaactggttttggaggatggcagtggcaaagagatgatgtagttcatcaaagaaataaaggcagatttgctgagtatcctgacggtacagttgaatatagataagaataggaaagggcaagtttgctcttttttattttggctatgttttaaatcagtgttgaaaatagatatatattagaaaaataggttataatattagatagaatagtgtttaggaggtagaattatgccaaatgtgaagtctatattaaatcatattgaaaagttaccattacagcagaaagaacaaatactatcaactttagaagaaattcttgtcctaggttcacaagtaagccaagtagaacaagaagttaaagaatttagattttccaaggggaaagtatgcccaatttgtggttctgaaactatatcaagaaatagcaagtataatggtaaacaaggatatatctgcaagtcttgtaaaaagtcctttactgacttcactaattctgcaacctataaaagtaagaaaacattagataagtggcttaaatatgctaagtgcatggttaatggatattctatcaggaagagtgctaaagttgtagaaattaatatagcaacaagtttcttttggagacataaaattcttgattgtgtaagcacattttaggcaaggggtatgttgatggtgttattgaagcagatgaagtattctttactgaaagttttaaaggtacaaaaccttctaatatgccaagacgctctcgtaaaatcggcaaacaagttaagaaaagtggtatatcaaaggaacaagtctgtattactactgctattgatagacaaggtaatttaattatggaattagcatgtaaaggtagaattacctctaaggaattagaaaaattatatgatggacatataagcaatgaatctatactttgtactgatagtcgtaaaagttatatacaatttgcaaatgatttatcattagaacacaaacgtataaaaagaggtaaacataaggaaggactatatcatattcaacatattaatgttctacacagtaatttaaggaaatggatgaataggtttaatggtgctgcaacaaaatatattagtaactatattaagtggttcaaatggcttcaaatatttgatacacataaagaaataataaaggctaaaaactttatagttcaaagcaatgtagcacatgcatatatcaaagtaaaagacttaaaatatagagagccaatatgtgtataacatatgtaatattttgtaaatgatgcaataataagtgctattaacaactataattagattgaattttataaatatggaggtttatagatgtacaacaatagaaaattagttctatatattgcaacaagtttagatggttacatagcgacagaagatgattccttggaatggttgtttaaaactgaaggcgaaggagataatggatattttgaattctacaatacagttgatactattctaattggtagaagaacttatgattggattattgaaaaagaaaaaggtaaatttccttataagaataaaaagtgttatgtattttctaaatcagaaaaaggtaaaaatgaaaatgtagaatttattaatcaagatgtagtggaatttacaaataaaatcaaaagactggatggaggaaacatatggcttgttggcggtggtgttcttctaaattcttttattaaagaaaggttagttgacgaatttattattactatatcacctacactaataggtcatggaatacctttatttaaaaaaaatgattttgagttagaactaaagttaaaggggataaggagatttaatcaatttgttgaactccattacgaggtgaaataaaacaattgatatttagttcataaatttcttatagtgagtattataggtggacaatcctacctataatttttttaggctatatttcaatactatattaaaacatagcttttattttaaataaaccgttatataagattaaggtgcaatttaatttagtgcttgaagtgattgtgtagaataactataattggataataagatagttttatgacattgaaaggagcgtcttaagatatgatttctaaagatatactaaagaataaagaatatgattttattaaaactaataagcacctaggaaaaaatattatacttttaggcttgtctggaagttactcttatggaactaataatgaaaatagtgatatagatgtaagaggagtagcattaaatagaaagtcagatttaataggaatgacatcctttgagcagtatgttgatgataatacagatacctgcatatatgcgtttaataaaataataaatcttttgttaaactgcaatccaaatacaattgaattactcggattaaataaagaacactacttatacttaaatgaaattgggcaggaattgttaaataataagaaaatatttttatcaaagagggctattcactcatttggtggatatgcaacagcacaattaagaagacttcaaaacgcactagcaagagattcttatccaaaggaagagaaagagaagcacatattcaattcagtgaaaaatgcagtacatgatttctcaaagagatatagtagttttgatgagggttctcttaaaatttaccttgataagtcaaatcagccgggatttgatttagaaatatacttggatgcaaatttaaagcactatcccttaagagattacaaaaacatatgggcagagatgagtaatatagttaaggattatgataaaattggaaaacgcaataaaaagaaggatgataatcatctcaataaacatgctatgcatttaataagactgtttatgatggctattgatattttggaaaaaggggaaattaatacatatagagtacatgaaaaagaattgcttttaaatatacgaaatggcaaatttcaaaaggaagatggcaattttagcgatgatttttacagcttgcttaaggagtatgaaaatagacttacttatgcagcaaataacacaagccttcccgaggaacctaacatgactaaagtagaggaatttgtaatgagtgtcaacgaaagggtggttaaagatgaaatataatgattttgaaggtactatagaagagttagttaatatgaagctggacgaaatagaaaaaaaggaaaatgttaagatacttcatgcagtggagtctggaagtagggcatggggctttgcctcaccagatagcgattatgatgttagatttatatatgttcgtcctagagaatactatcttaggcttgaggatacaaaggatataattgattgggagcttaatgagacgcttgatataaatgggtgggatttgaataaagcacttcgtttatttcataagtcaaactctactttatttgaatgggccaattcaccagtggtttatagaacaacacctaagtggaaggaaatttactctgaagctgaaaagtatttttctatgaaagcttctatgtatcactattatggaactgcaaaaagcaactttcataagtttttagaagatgactatgtaaaatacaaaaagtatttctatgtaataagaccacttcttgctttaaaatggattgaggaaaagtcatgtccaccgccagtgttatttagcactttaatggagagtatgcttaatggagagatgaggctactagtgaatgaacttcttgagatgaagaaaactatgaaggaatccgataagggaaagcgcgttgataagttaaatgagtatattgaaaatgagcttacttattataaagatgaaattgtaaggagagaagacgatagaaaagcagagtgggacgagcttaatgaggtctttatgaagaatatattgtaaatttttaatagaaggaataaaaggattatgatataaatcatggtccttttaatttgcgtttaagattaataatacagttacaaatagatttagataaaattgattattattgtagcaaatcactcagagattgatcatagcggcattcttttttctacagcagctatactggaaatgataagagggcttgaatttaaagataaaaaggcagctgcatttggaaggtatggatggggcggtgaatcagttaaaataattacagagtggctaaagaaagcatgctttgaaataatagatgacgaaataagagaactgcggaagcctgataaaaaagggagatttaaattaatagtgaaaataaaaaaatgtttaaatctagtaaacttgaatatttctgtggatagaagacgtggagtaaaatctacggctttttattagaattattctgctggattttgttaaaaatattctgcaaagacatagaatgttgtttgagtgatagatgctgttgaaaataatgaaaggtattgaagatgtaaaagtaaatataaattagaaagatgctgtgtggaaaatccgagtgttaaggatacagaaaggtagttgcaaatttcaactagtaatttatatacttatgttggatattttctataaattgtcatgtgaaataataaaattaagttgaagtataacaattgtttgaaaatgcaaagattaaattagaattagattttgtaggatatattttaattatagaattttactaaaaattatattgagagttttgcaattaacaaatggataattaaatgataagataataagtataaataggcaaatgaaaaaatgataggattatattgataattatatatcatgaatgcctaggaatctattatataaagaggattttattatgtatatatcagatgaagaaatatatatgtttcaatgttttttacttgattggtatgataaaaataaaagaaattttccatggagatatacatttgacccatataaggttttagtttccgagatattattgcaacaaacaaacgttgataaggttgttgagccttattttagaataattaataaatataaaaatatacatgaacttgcagaaagcgaagatgtttttttaaagaatgtatttaaaggcataggtttattttatagagctgacagattaaaaaacatagcaggtaatatagttaattataataaaaaagtgattcctgataaatgggatgaattgataaagataaagggtataggatactatatatgcagtgccttattgtgtttcggttttaataaaccgtatgctgttttagatactaatgtaataagaatatttgaaagaatatttgatattaaatctgaaaagaaaagacctagagatgatattaaattatttgaatttgcacaattacttatacccgaagataggtatgtggactacaattatgctattctagactttggagcatgtatctgtacaatgtataacccaaaatgtagtcaatgcatttttagatttaattgtgaaaatatttgacttgcttgggatatgcagcagtaaatgttaaaaaatgaactgctaaaagtgatactttagatgagtatgaaaacatgtgatataattttcctttaaatggaggaggatctgatgaaattatagataatttgggaatagaaatttttaatggagagcttaagaaagatttggtaaaagaaataaatctcgtaggtggaataaaaatacttgatataattagaatcacacttaaaagtttatagtttggagttaaaaaagataccattataataaaaagtaaagtaaaagagaggttagttgaaaataagaaatttagataatagaataaatacagtaaaagaaaaaatggtacatagttgttttttattagttaaaacataagttttgcttcgaataaaaatctcaaagttatagtatagtttttgatgaacttgacaaatagtacattttaagattatattttatttaaagtgatttcattgaatattaatgatataataaaaaagattgtagtgtataccaagctgcaattttttttgtataatttaggagaatatattactaaaaggagagaagtttcaaatgcacactcataaatttactgtaggaagtctgtttgcaggggttggaggaatctgtttgggattcaaaacagcagagtatagaggactgggatataatcttatatgggcaaatgaaatagatgaatatgcaggagaaacatataggcataattttgaccataatttaatagctggtgatattgaaaagatagtagacttgaatataattcaaagtgagcaaaatagatatataaatatcatgaatgaagttgctactgatgaagaaaggataaagtataaggttctgatagaaaaatgtgaggaagagaagcaaatatacagagaaaagcaaaaacaaattttaagttcgaaaatagatgtattaaatggtggatttccgtgccaggcgtttagtatagcaggagagcaaaagggatttgatgaccatagaggaaacttgtttataagcattataaaattaattagattacttgattcggttcatggaaaaccaagagtattatttttagaaaatgttaaaaatttgatgtcacatgatggtggaagaacatataaagttataaaatcaaaacttgaaaaagaaggatatataataaaagaaaaggtattaaatacaatggatttttctcatttaccccagaatagagagagaatatatatagttggatttttaaataaaaaagatgctgaaaagttcactatgtttgataatataggggagttttatatcaataaaacagttgatgaaagagtgagagatattaagaaagttatcgattatacgttaactaaaaatactggagataagtattattatacaaaagaaaaatatcctaaatattttattacagaagaagagtatgataaaattccagaaagttatagaaaagatgtaagaataaatttggatgaatcaataacagaagaatatcaattttatcaacttagaagaggaatgtatgttagaaaaaatatgagtaatgtatgtccaacgttaacggctaacatgggaactggtggacacaatgtaccattaattaaagtaaaggatggaattagaaaacttacgcctaaagaaacttttaaacttcaaggctttcctgttggtaatgggtatgaacttccaactaaatatattaatagaccttatcctgaaagtagattgtataaacaggcaggaaatgcagtatcagtaccaattataagattaatagcagaacagattttgagggtattagaagaatagttacattagtgataatacagatttttttgtgaagaatagattgaataatataattttaaaggcaagagagtatggaatgttttcttgtcttttggtaattatccaaaatacttagtcagcatattaagatattattttatgtttgtgataaaatatatttaataagtgtttagaggtggttactatggcaaatattatttgggacaagttttccgaagatgaaaagaatgagtatatagaattcttaaaaatatttggatcattaagcggtctatttaaagataataaagaaggtgcaaattcacgtaaaccatatttatattataggaatcatgaacagcttttttctagagtttttaatgtggaagacttaactagaaaagatagtgcttttgatgcacttgcaccttggaaaggtgaaagaattggaattggtcttaagacatggatacatactaaagattgtacatatcaaaaggtggctgaatttaataagttagctccagaagttatagaaccacttataaaaaatggtacaccagaggaagttatctataaaatttcagagcttagaaatgagcgtataatgcttgataaacgtttatataggaccgatatggatgtatatcattttataactcgtgatgatgatgtcatgaatatcatagaaacttcctatgatcttatagatattaaaagtattgaacttataaaaagtgatggtaaaacttatagttttaaagataagttacataaatataaattctataagagtaagagtgtattacttgaagaatttgatgcttcacagggagaaataataacaaagattccaatacaacaatttgatgatcctttcgaacttattagaatgattaagattccggaacaactttagagactgtttatcaagaaatttatcttccgttatatcaggataaaaaggagggaaggattgtatcaaatcgttctggtgtaaatatcaggcactctaaatcaaagtctaaggggagtaatattccgcgtccagagtatgaaattgaaattagaattagtacatggatacatcatatttttccaaaattctttggtataaatgcatttgataaaaatcaaattaaaaatgaaaagttaaatgattttgacttgattttaccagatggaagagtattacgaggaaggataaaacaagaaggtggcaaaagtttgcaaacaaatccacaaggagcacttggggaatggatacttaaagatatattaggacttaaaggcagaaagattgttacctgggaactattggacaatttgggtattgatagtttaaagataattaaaatagataacaaacatttcaaaataacagttgctgaaactggagcatatgagaaatttaaattagataatagagaaaatattatcagggctggacttaaaggaatacagaggccatattttagaccagaacttgtacaagaatttgaggaacgtaatttagactgactttgtaatttaatatatccatattgctaaaatagaaaattattagaataggcttaaataatatagtggttgaggagactaattgagaaaaagcattagacatataaagcaaaggatggaatactaaaatttattaaggggtgaatgataatggttatcgatatgagcaaagaacaagtttacactacagctttatttaaaataaatattatgtaaacttgtatgataacctgtcagaaacttttaaaataaaggataaactaaaagcctaggcagaagtcaaggcttttactattttttgcataaaaaagttaaccttcatgacaggcttaaaatggaggaaatttaatgaaaaacatatatagaaactcaaattttattatttatttaattggcatatttatatcgggaatcggtacgaagcttacaactatagcattagctaataaagtaataggctttagcggaggagattttaatgttaacttagtttatattcttcaaagtataccaattttagtactaggaatgtttgcaggcaacctagttgataagaaaaacaaaaagatagtattcataatgctaaatataatgctttcttttacttcatttgcctttgcattaacaaataacagacctattgtttttctgttggtatttataactggtattatgcaggctttttatataccagtggaaactacactcattacacttttagttaataagaaacatctagctaaagccaatggaattataatgtctattaacggcatcataatagttattggatatgcttttgcaggtgtcttaataagctttgttggcaatgatttggcatttataattgatggcgtatcttttatgattgtaggtataatggctattttgcttaaggtgagtgagaagctaaataaaaaagaagagaaagaagcagacttaagacaagatattattcaggggtggaagtttattaaaaataatgaaaatataaaatggatgtttttaatagatgtaattataacgttaattatatcaatgcaaacccctcttacatatatttttgtagagaaatatttaggaggcagtgttcttatgcctaaaagagtaggattattatttgcctttgcaggaattgggacaatatttggaggagcaatacttggaaggtttcaaagcagaaacaaattaatgcttttagctatatgtcttgtaattgatagtgttgtagtgacagtttttgcaattaatagatactttccatttagtcttgttttattttcaatactaggaatattagatacctttaatggaggtatacttagaacagttcttcaagaaaaaacgccaaaagacttgcttggacgtgtatctggttttgtgaactctgtagttcaacctgtaagtgtcttgtcgcttttaattggaggagttgcttcaagctttatagaggtaaaatgggtatttactataggggctgcaatagagctttcaacaggtatatattttatagtaaaacaaaagagtctctttcaataaattttacaactttatgacaagtacagcataagttttagaaacctcgattgtataatgagattgtaaaaaggttttgtgcactaaaccaataagcttaaaattggaggagagaaaatgagtataaaaagaataagcatgtttttacttgcggctgtggtagtagggtcagcatcattgtcaatatatgaaaacaaaaatagtggtgcaggaactaaaaatgtggttgttacagcgcaaagtaataatattaataaaaataatactataagtgatgagaaagcggttcagatggcaattaaggcaatgaaggactatatgggagtagatgctgcaagtcgtttttctggaaccgaaattcatagaactgaggctaacgaatacaagcaaatagaggatgctgctgaggataccattaagaaatatccaagctatgaaaaaaaggttgagtatgctaaaaaacaattagaatgggtaaaacattcggattattatatatatgtgaactttatgtctaatgatggcacatattttgttgcaattgatgagaatacaggagaggtagtaaatgtgacacttataagcagagaagacacttctggtacctataaggtggatgatggtaaggtcaaaagtgcggctttaagctatcttaagaaaataggtaaggattcttgtgtggatcttaactccatttcaattgacaatgggaatgggccacttacaactgtaacattcaacattaaaaataaaacaggtaacagcaaaagagatgtaatagtattagaggcgagcttgaaaaattataatattatacattatcaagattattcaaattcgtataataaataaattagcttaacaacttatgcaggtactgtagtttggtttatgcataagtttaagctttttatactaattaattgtttgaaatagttaatacttaacctataattgtaagtaagtgtattttatgtgattaaggaggcaaaaaacattttgataaatattctaattatcgaagatgatgcagccatttcaaatttgataaagttaaatttaaatatggcgggatatataagtgaagctgtgtataatggtgaagctgcactggacttaattgaaggtagaaattttgatttaatacttttagacataatgctgcctaaaatagatggttttagtctatttcaaaaaatcaagtataaaggtataccagtaatttttttaacagctaagacttctgtcacagataaggttagtggacttagaatgggtgctgatgattatattacaaagccatttgatggtatggagcttttggcaagaattgataatgtacttagacactacgataaaaatgaaaaatcactaaagtttgaagatatagaagtgcaattagaagaaatgaggcttaaaaaaaatggacaaattattgatcttaccgttaaggaatttgaactagctgcctatttaataaaaaacaaaaatatagttttaactagagaaaggatagctgaggagctttggggatacgattacctcggtgattgtagaacaattgataattatatacaaaagataagaaagaaattagactggaaggacaaggtcaaaactatatttaaaatgggatatagattggaggaataaatgaagctttgggagaaaatttttatatgtacacttgttgtgtttgaggcgttttttgttccttcctccatatatttaataaatagtagttttaaatcaaatcttcaggatgaaataagttcaggaataagcgaagagaagagattttcctctcttatacaagctaatctcaccttttttaagattaaaaggggaaagtacgatgttagttacaatttaactaaagaagaattggatgtgtttataaatacatacttgagcgattttaaggatcaaaaggtttatatagatgttattgatgaaaagggaaacagtgtttttaatgacttgtctaacaaattacctaaaaaaagacctgagcttgatttaaacaagaatcaattaaagtacatattgcgtgatataaacggaaaaacatacttatttatagtatcaaaacttaaactagacaatagttactataaatttagttatattaaagatgtatcaaagatttatgacaatagaaaatacctattgaatgttcttttaaaattaaatatattcataataataattttgattatagtaatgttaatattaagtaaatttatagtaaaaccaataaatgtaatgataaaatcaactcaaaaaatagcagaaggaaattttaatgaaagagttagtggagttagaaatgatgaaataggacaattgtccaagaattttaattatatggcggatgttattgaagataaaataaaggagcttaaaacttcttcagaggataagcagagatttatagatgacttaacccatgaaataagaacacccttaacctctataataggttatgctgattttttgagaactgcaaagtatgatgaaaaaacgctttttagttcattaaactacatttatgatgaaggaaaaaggcttcaaaaattatcatcaaagcttatgcagttaactattttaagaaaagaaaaatttgaaatgcgagaggaaagtatagaaactcttgtgtttagggttaagagggccatgcttcataagcttaaagataaaaatattaagcttaaaatttcagcagataaatttacacatttaatggatatagagcttattacaattcttgttactaatttaattgataatgctattaaggcatccaaaagtggagatgaaatatgtttcaatgcttataaaagtagtgcttcaaatttgatacttgaggtcagagatacaggttttggtataccaaaggaggatgtacaaaaagtgattgaaccattttatatggttgacaaatctagagaaagagcaaataacggggcaggaattggacttgcactgtgtaatgagattgctgtgcttcataagggaaagctgtatatagatagtgagcctaaaagaggtacaaatgttagagtgataatttaaaaaactaactaaaagccgtggcaaaatagctgcggctttacttctttcataggagttaacacataacaataattttataaggaatagtttgagctggtatgcttttagtagagggaccataaatcacaattaaatagcggtttctaagatttcctgtaaataattgatcattttctaaaattatttctgtgctcaaagaaaggttaagttttaaagtattatcgctgcttataagttcactgttaaaatagtctacctttacattttcgccgggcgcatccattgaaacaacaagggctttgtattgaggaggaaatattaagatagtgggtgcattggcatcataaaagcctgttatcatatcgtagggatgtattgttacatggtctataaagtaagtgtctggtgctgccacaaaattaactaaacttccaaagctgtttgttacggacataagtttgtaacagcctgtatcttcattattagtggctgagtgaaagtcgctaatgtttgtaaccataccatggaaggagttgaaatttttcatttattattacttcctatataaatttctattatgtattttatgcatttatcagttaagataatataaaatttcaaattcatgtaatgaaatataaagttaagcgtattaacatgtgaaaatacttagctaagtaaaaagaaggaaggcttataaaaatatggaacagtctatattaagtaatttagataaaatggaggatagagaaagagcgttttcttatatttttgaaacttactctaagagagtctataactatatatactacagggttaattgtcagtatactgcagaggacttaatgagtaagatttttgaaaaagttatgttaaaaattgattcttattccgagaaaaagtcttcctttgaggtatggctttttaccattgctagaaatgtgttaaatgattattttagagggctaaaaagacatactttattttcacttgacgtttttaaagaattgctatccaatgagcctaatccggaagaggccattttaaaagaagaggctaattacaagcttttaaaagcactaaagattttaagtaaaaaagaaagacatattatagcccttaaatttggtgcaaacttaaaaaacaaagaaatatcggagctactaggcattaagagcaacaatgttgggataattttgtttcgaacaataaagaaattaaaaagccaaatggaaagagagggatatatagatgaataaaaaagatatagaaaataagttttcatcagatattgaggactatattgatggcttagagaaaattgataattataaagatgaagagtacgatgaactttttaagtttggtaaaattttagctaataaagatttcagtaagaagataaataaagattatatatatgaaaagtgtttgaaaaatatcaataagaaaaaaggagaaaataatatgaaaaaatcagatatattaatgaaggtagcagctgcatctgtagcttttgtggtagctggagcagcttttatgcaaacctcttttgcaaaggatttatcagataaaatattaaaacaaatatcaattggcagaataaacgcagttaaggttcaagttggaaaaggtaataaaagtaaagaagtgccagagaatttaaaagggaaaattttcgataaaaatggtaaggttgtaactaaaattacaaaagaaaattgcaaagacctctatacaaagaatggagaaaaaatttctgattttactaatggaaaaatagtaacagttaaggagagagaggcacaaacgtatacaattactaatgtaaatgatgtaaataaatacacttgttttaaggttatacttccgtcatatttaccttcgggctataaatttgattatgcaaaactatataaagacaaaaatggaaactttaataacaataagtacattacaatgtattttaaaaatcctaaaaatccaaatgtaatgtttcttcaagaacgtttgtcttgtgaagaaaccaaatatacaatgggaggtgaggacgatattaaaaaaataaaaataaataatgttgatgcggtgctttctggtaatgaatctattgattgggagtataataaatctctttatagcttgatattaaaggggatatccgtaaatgagcttgaaaaaatagcagaatctattaagtaaatattttaatataaaagcctatattctattgaatatgggctttaaatttttttattataatgttaaattgtaataagttaatattttaatagaaacaaaaggagtctagtatggagttaaaagaggcatttaaagaagttgaggttcttcaaaatgtaagtttagatacattaaagcttttggagaattacggaagccttaagaggataaaaaaaggggagcatatttttagagataaggatcaggtatcagttatatacattgtaattgagggattggctgcattatataaaattaatagcgtaggagaaaaaaaggttatattcgtatttggtaaaggaaaaatgctcaatgaagttatatttcaagagatgtttgcctctgtgaattgtgaagtacttgaggatgctttgatattatgcttttcaaagaataaacttataaaggttatggagaaagattttgagttaacaaaagcggttatgaattctatggcgattaaaattagaaggttgtatcgtcagcttaaaaataccaccaattcaataagaggagataaaaaaattgcagctaaactatggaagctatcaggagattatggtattaaagtaaaagaaggaactaaaattaatatggaacttagcattacatacttagcagatatgttaggatctaaaagagaaactgtatctagacagctgaagcttttaacagaaaaaaatttggttattctaaagaaaaatgaatttatcataccaaatcgtgaaaaaatcaagaattattttaaagcgccgtgataaaaatcacggtaactttttttattttttgttatatttttaacaagaaatgaaaaaagggggttttaaagtgttcgaagatgattttcaaacagtatctaaggctgcaaaagctaaaactagttttttgcagaaaaattttattggatattttttagcatctatgctggcaggaatgtatgtaggctttggagttttattaatttttacaattggcggtatgcttaaaggaatggcttttagtaagattgtcatgggtgcttcatttggaattgcattgagcttagttatactagcaggttcagaactttttacaggaaataatatggttatgacagcaggaatgttatcaaaaactattaagctttctaaagcaataaaattatggattgtttgttttattggaaattggataggggctattttattagctgtgatgttttatgcctcaggattgttaaatggatccacaagtaaatttatcgcagcggctgcggcatctaaaatgaatactgctatacttcctttattttttagaggaatactatgtaatattttagtttgtttggcagtatggtgtggctttaagtgtaaatctgaaagtggcaaactcataatgattttttggtgtctatttgcatttattacctgtggatttgaacatagtgtagcaaatatgacgctgctaacattgggactactagctcctcacaaagcagctgttagcttgggaggatacttttataatataagtattgttagtctaggaaatatggttggaggtattttatttgtagcacttccgtattttattatttcaaggcagaagaaaggagtataattatgggttatcgtttgacgagagaaaatttaaatactttgttccataagttaaaggaagattatcttatatatgcacccaaacgtttaataggtaaaggtgccttttctgatacagatagggttagatatgacaaaataaataatgtagaggaaatagagtttgatgtaaagtctgatttttcattcaaagaaatattattacctatttcggaaactttatttttctttactgaggatagtgtaaaagaagcagaaggacctaagaagggagcaattatctttttaagaagttgcgatattaatgcagtaaagcgcttagatcagatatatttaaaaaatggctttgaagatcattactataagcgcatacgtgaaaaggtaaagtttgttttaatgccatgtaaaacatcttttgaaaactgtttttgtgtttctatggggactaatcaagctgatatgtatgatgcgagtgtggaactaagggaagaacatttttatatagataataaggaagaaaaatggaaagagtttttaaaagaagtaagtttagaggagcttgaagttaaaccgtcctttgtaatggaaaataaaacaaaggtaaaagtaccagagggaattactactaaaatatttaaatccaagatgtgggatgaatatgacagccgatgtattaactgtggacgctgtaattttgtctgtccaacttgtacatgcttttcaatgcaggatattttttatactgataatggaaaggctggagagagaagaagagtttgggcatcttgcatggtagatggctttacaaatgttgcaggtggaggaagctatcgaagcaaaaatggacaaagaatgagatttaaagtaatgcataaggtttatgactataagaagagaaatggataccatatgtgtgtaggctgtggaagatgtgatgatatttgtcctgaatatatttcattttctaattgcatcaacaagttaaaaggtgctattaaggaggtagaggacaatgagtaaaaatgaatatgtaccttttctttcagaaattaaggaagtaataaagcataccaatatagaatatacttttcgcatgagctatgatggggttgttaagccaggacagttttttgaagtttctatacctaaatatggtgaagctcctatttcagtaagcggggttggagaaaatacagtggatcttactataagacgtgttggtaaggttacaaatgaggtttttgaacgttacgttggagacaaactgtttttaagaggaccttacgggaatgggtttgatgtagaaaattataaagacaaagaaatagtgatagtggcaggaggtactggtgtttctccagtaagaggtgtcgtggagtatttcgctaaaaatagtaaagaagccaagagtgtaactcttatagcaggctttaaaactccaaaggatatcctattttcagaggattttaaagaatggaagaataatatcaacattattttaactgttgattcagctgaaggcgattctaattttaaagaaggattagttactaaatatattccagagttaaaattacagaatgtaaaggaagcatctgctatagttgttggacctccagcaatgatgagatttagtactcaaggtcttttagatgtaggcttcaaagaagaaaatatgtggatttcacaggaaagaaagatgtgctgtggaataggaaaatgtggtcattgtaagattgatgatgtatatgtttgtttagatgggcctgtgtttaatttcacaaagggcaaaaatttaattgattaggaggaagagcaatggatattaacacaaagaatttaaagaagaatgccttccgtgttaccaaaagaagaggtattacagcttctagaatacgtgtgccaggaggacatttagaagctaaatttctttctatgattcaaaatatagcagagaattatggagacggttctgttcatataactagccgtcaaggctttgaaattccgggaattaagtttgaagacatgcctaaggtaaatgaacttttgcagccaattatagagggactaaatatcaatcaagaaactgcacttcaaggttatagtgcttcaggaacaagaaacattacagcctgtgtgggaaatcgtgtatgcccatatggatgttatgataccacttcttttgcacaaaggatagagaaagctgtatttccccatgatttacatttcaaaattgcattaacgggatgtcctaatgactgcgcaaaggttagaatgcatgattttggcattatgggtatgactgaaccacactatgaaagtgatacatgtgttagctgtggagcttgtgttaaggtatgtaaaaagaaatctgtaggagcgttaagtgcggttaactataaagtagttagaagaggtgaaaaatgtattgggtgtggagaatgcgttttaaaatgccctacaggagcatggactagaagtgaaaagacatattataggttaactcttcttggaagaacaggaaagaaaaatcctcgtttaggagaagattttataaagtgggtagacgaagacagcattataaaaattattctaaatacctatgattatgtaactaagtacattgatcctaacgctccaggaggaaaagagcacataggctatatagtagatcgtactggttttgaggaatttaaaaagtgggcacttaaggatgttaagctgcctagcatagcagaggtttatacaccaatttattggaacggtataaagtactaattatatataagaacataagagttagaaaaggcttttatgttcttttatttatttatgatacaattatgattagaggtgtgtaaaatgtacagtataatgataattgaagatgataaaaagctaaatgaacttataaaaaatcatcttgaaagatatggatataggacattttctataaaagatttttctaatgtaagaagcgagtttgtattagagaagcctgagcttattttgatggatgtaaatttaccagtgtatgatggtttttattggtgcagggatataagaacaatctcaaaggttccaataatattcatatctgctagagattctgatatggatcaagttatggctatagaaaatggtgcggatgattatataaccaagcctttctcttacgatgtgcttatggcaaaaataaaaggagttttaagaagagtttatgggagctattcaaacaatgtgaataatgaggtttttgaggcaaaaggactattcttatatataaatcaaagtatgattgagtatgaggacaaaaagatagagctcagcaaaaaagagtttcaacttttgtattctcttataaaaaacgcagataagattgtttcgagggaaactttgcttgatattttatggaatgatgtggattttgttgatgataataccttgtcggttaacatgactagagttagaaaaagattagaaagcataggaatttacaatgccattgagactaaaagagggcaaggatataaaataaatgtaaattggtaaaagaggtgaaaaaatgaattttagagcctttgttaaggataggatggcgtatatagtagtctatggtttaagtactgttctagctattctaataatgaatttaacttccataataaatagagtttacatttcaggtattaatatactttatgcttttcttatttctgcgatttttctcatagtgtttttaatgtatgattactacaagaataagaaattttacaatcagttagatttaatattaaaatcagaggaagatttagattatatgttaaatatagaaagaggcagtacattagaacaagaaatgtttaggaaaattttgcttaagttgtataggctttctgaaaacaagacagtaaagtatgaaaaacggcataaagaatacatatattttgtgaatcaatgggtacaccagatgaaaactcctgtgtcagttattaatcttacacttcaagatgaaattaatgaggataatagggctgtgtttgaaagcatatccgaagaaaatgagaagcttcagcatggaatagatatgatgctttacaatgctaggttaaatgaatttaattttgattttagtgtggaagaacttagtatagcttcagtcttaaggcaggttattaataacaacaaaaaatcgcttataagacatcatatatttcctaggataattgaaaaagaaaatgttgtagttgaaacagatagaaaatggattaagtttgttataaatcaaatagttataaatgctataaaatattcaaaagaagaaaaaggagataagcatataacctttgagataaaagaagaggcttcaagaagtacattgaaaatagcagacgaaggtataggaatacctaaagaggatttaacaagggtttttaatgccttttttactggaaagaacggaaggaagacggatgaatctacaggtatgggaatgtatctttcaaagaaaatatgtgatgctctcggacaccagatttttgccgaaacaaatgaaataaagggagcttcattttctattgtgttttataagggtaaaaatatatttaagttgtaagctttcaatattgtaagtttaaatttatatttgaaagggaaatcgatacattgatttctctattttttttataatgtatatgtaaagtttgtacttagaaaggaaggataacatgtctgtattaaaggctgaaaatataactaaggtttatggagataagagaggaggacttaaggtaagggcactggataagtttagtataaaggttgaaaaaggtgagtttgtaggagtgatgggaccgtcgggtagtggaaagagtactctcttaaatattttagccacaatagatacgccctcttcaggagaactttttataaatggagttaatttagcagaacttgatgaaaagaaagcggctttgtttagaagaaaggagcttggatttatatttcaggattttaatctcttagattctttatcaataaaggaaaatataatacttccattagtgttagaaagaactagggttaaggaaatagaagaaagacttaacagcatttcagaaatattaaatattaaaggaatattagaaaaaaggccatatgaaacctcaggaggacagcagcaaagggcggcttgtgcaagggctttaattcacaatcctaccctaatattggcagatgagcctacaggaaatcttgactcaaaggcatctcaagatgtgatggaagctttagaaaatttgaataacgaaaagaagaccacaattatgatggttactcatgatccttttgcagcaagcttttgtaaaagaattgtaatgattaaagatggaaaacattttttggagattgtaaaaggcagcaataggggagttttctttaaagaaattatggatgcacttactgtaatagggggaagacaaaatgaccttatatagccttgttttaaaaaatataaagggaaatttaaataagtttataatgtactatttaagtaatgcctttgtagttatggtgtttttcatatttgcaaattttattcttaatcctaatgtaaagagtataaaaactatgggacaaatgggagctgttactacagagataatgtatggctgtgaaattgtaatacttatttttactttagtttttacaaattactctacttcgagttttttgaaatcaagagaaaaagagtttggacttttatctatgtttggtttgacaaaaagtgaaataagaagatatgttatggctgaaaatcttattgtagctatgctttcaatactaacgggagttttacttggaatgttgttctcaaaattattttttatggcagtttcagtaattttacttttaaattcagagcttccaatagtattatcctttaaggcagtaggaattactattttatgttttttgatattgtttcagggaactgaattttttgtaagctataaaatcaagagtaacaatattatagagcttttaaagggagaaagaaaagctaaacctgtacctaagttctcaaaaaagaaagcaatattggccataattcttattttatcggggtatgttatggcattagtgtcatatcaaatgataatagttactatgtttattattttaggagttacaatagcaggaacttatcttctttattctcaatttagcgtgtaccttacaaataaacttcaaaataataaaagggttttttatagaggaacaaatatgataaccttagctcaaataatatataaattaagagataatgcaaaaatactttttacggtttcaatactttcagctgtaacacttacggcatcagcaagtgtctactcttttcagaaaaccattgaaaaggaaatgcttttaaattatccacaggacataggctttattgaaaatggtctgtcttctcatgaaataatatcacctgccaaggttgaaaagcagttaaaaaatagtggtaacaaggttgaaaacaaaaataaaattattcttataaaggcaaatagtgatgatgtgtttaaaactgaggtttcacgctacggaaataaaaataaaaaagatttttacattatgaaaaacagtgactacaataagctagcaggcgaggaaaataaagatcttattgatgttaaaactaatgaagcagtggttcgttcgtataactttgatggaaaagaaaatgaaaaaacctttgaagataacagcttcttaagtttaaagatttacggcaaaaatataaaatataaacttaaaaaggagatagggggaggaataataaatgaggatttattaagtaccaatacgattataataaatgatggggactttagagcacttaaggataaattaaataatgataaactctgtgtatattacggttacaacataaaggattggagaaaatctgaaaaagttattaaaagtttgaaggcacaagttcctaaagaaatgagagaaaggttcacagaaaggataacaaatttctctacaagtatgaaaagcatggctattttcttttttataggaacgtttatttcagtattgttttttatagcaacaggaagtatactttattttaaaatgtttagcgaaattcagaaggatagaggagaatttatagctcttaaaaagatgggagtgtcaatagaagaggtaggaaaaattcttagtagacaatgctttataatgttctttttgccttttataatagcattcttgcatacattctttgcaataaaggcattaagtaatattttaggaacaagccttaacaattacttaatgcttatagtagggatttatttacttcttcaaataatatattttaactttgcaaggtatatgtatactcgccaaataaacagttggacataaatatatattttaaaataggcaggaaaatcgtttttatgatagtcctgcctatattagtctctctaggattacttgcctagttcgtcccagtgttcataggcttcatttaattccatgaaagaagctgatttgtctttagataatatagctccacgcaggcgagataaatttacgctaaaggcatttatttcatctctctcagaactaaattgaactctagctactatcttttgccatgtatttgataacttttcagtttcattgtaagcttttacccatttattggagtttatatcgcttacaatgattccaatagattttggaatgctggtttctttgccaattggattcttaagtaaatttccactaagcataataaatataaacaaaaataataaggctgtgggaataaagtatacaaaaaatcttctcataaaaaatcctccttagtaagggcctttatagtcaccgatatcaagcaccttttttatatgatctttatataaatctatatataaactgcctccagggtttaaggttgcaaggaatacttcggaaacgttttttattcctcggctttcaagtactttaaaaagccaatccttagttttattaagttgtcttaagttttcttcaataagaattccatcataaataagttctgtgcttattcccatttcgtttttcgtaatgttcatatcattacaggtcactggctgaagttctggtttttttagtacagagagctttccgttaggttcaattattgcaaaatcaacttcgtttaaatcaaatacatctttatctcttaataattccataatgtctgttgctctaaagttcatttttttcatagcatcttccattattttacctttcataattacaattgtaggctcaccttctagatattttcctgcatacctccattttgtactaatatactccataaggtacccaagaagagcccatgttaatagacctacccaatgaggccatgctctgctggataaatctgtagttagagttgcagctattgaacctatggttatacccagtatgtagtcaaagaacgtaagctgacttatttgctgtttacctaatattttagcgaaaataagcatagtaaagaaccctattatagaacgaacaattactactaaaccttcattcaagttgtttcctccttaatacttgtataaatgaattttacagtttatttgttagtcaaatgatattttgttatttcactaggatatcatttgactaaaaataatagatttataacacaaattatttatcagacatctttttttcaacagattcaatcattttttttgtcattagaccaccaacagggcctccaataaatccgcttaacttttcaggaccagcattctttttttcaaagccagcacctatttcttcagcatactcttctcttaatttttttaagccttcttttgcttctggcactaatggacgtctactcatagattacacctcctagtataatagagttctttattagttttgtatttttatataaagatatgcatgtaaatttatttagaagatcctcaagtcgtttgttttggtgtatataatgtaagttttatagtattcttgtatattgacacagaaagaattacatgataatttaagatgtgaaaaaagtaacaatttatgaaagaaggaattgatataatgatgtatggagcaattgaggctggtggaacaaaatttgtctgtgcagtaagtgatgaaaatttaaatatcatagaaagagaaagcataaagacaacgattccagaagaaaccatgactttggtatttaagttttttgataagtttaaattagaagctattggtataggatcttttggaccaattgatgtaaataagaaatcaaaaacatatggatatataactaatactcctaaacagggatgggctaattatgattttgttggagctgtaaaaaatagatacaatattccaattggttggactacagatgtaaatgccgcagcacttggagagctaaaaaaaggtgcagcagttaatttagaaagttgtgtttacttaactgtcggaacaggtattggaggaggagcagtagttaagggaaagcttcttgaaggatatggacatccagaaatgggtcatattttagttagaagacatgaaaaggatacctatgaaggaaaatgcccatttcataaggattgtttggaaggtatggcagcaggtccagctatagaagctagatggggtaagaaagcatatgatttaacagataaaaatgaggtttgggaaatggaagcttactacattgcgcagggacttatgacatataccttgacattaagcccagaacgtattgtgcttggtggaggagtaatgaaacaacttcaattattccctcttataagaaagcatctagaaaaacttatggcaaactatgttgctatgccaaatttagaggaatatatagtaccaccagctcttaaggataatgctggaattacaggatgtttattattggccatggatagtaaaaagttagtataatttaagcggctataacatcataatattataaaaggattttattctattctagaataaaatccttttgttctgcgtgtatttaattatttgtgtaaagtaatgaacattggttgtcgaaaaagataatataatgtagaaatatattgcgtatatgaggaggaaatgtgctgtgaacaataatgaatttttaatggagaatataagtgatgaggaaatactaagggcatttgcaatagtaattccttacctaaataaaatcgttagagatgatatggcctttggacttactgatgaggagaagtatcttgcatacggacctgcaaagggatttgatttgaatttaagagtaggttcaccagcagtaggacctgcaaaggaagcaatcaaaacaggtaagacagtaagatcatcaattccagctgacgttttagggaaagaaatcaaggtattggtagctccgataaagaattcaaagggaaaaattataggaacaataggtgatggcatagatattgatgccactaaaactctaacaaataatgtaagagatatacttgattctacgtcagaagtaaaagaaagcatatctaatatggcacaattatcaatgaaaaacgctcaggcaggaaaggatgctattgaaatagtaaatgcaaccttaaatacagtaaaacagacctctgaaatattagagcttataaagaatatagcagatcaaacaaacttattgggacttaatgcagcaatagaatcttcaagagcgggagagcatggaaaaggattttcagttgtagcttctgaggttaggaaacttgctaatcaaagtaaagagtcagcagctaatattaaaaaaattatagataatatgaattcgtcagttgagagtatttctagtgtggtaaataatactgctgaatttagtgaagaacaagctggatcaatgcagaaacttgattctaacattgaaaatataaatgaaaaaattagcaagctaaatgaatttattgataggtttcaataatatatacaaatgtggagatgttctttcaactaataaatttatagaagatgatgtggaataaaattgaggagctgtaatgaatgaacttacaagtgtatataagtttcaacggaaactgccgtaaagcattggaattttacagtagggtatttgaagcgaaaataaataaaacagtaacctataaagaattgccttctcatcctaaagttgccattgaaaaagatgttgaagaattaattgcttattctagtatcatcttgaaaggtaattatcttaatatggtagacgtttttccaggtatgccgctaacaagaggaaataatgtaagtttaacaattgttagtaataagtctaacgaattggaagtgctatttaataaactaaaagaagatggaaatgttaatatggaacttcaaaaaacatattggagcagatgttatggttctttaacggataaatttgggatagagtggcattttaattgtgaagagtagtgaaaaaataaaaatatttatattaagtgcaaatgcagaactgcacctaaaaaataaagaaggttaaaaattggacagctacataaactcatcaaagaatattttaaaattattacactttaatgggttatttaataataaatttttatatttatgtaaagctcgaatatatgagaggaacatttatgattttactcaggtaaatttataaatgttctttttgctttataaaaacaggcggttttgttgaatacaaataaattttgtacgaaatttaaaaatatgctataataaattacagttaataacaaaatatgacattgtcagtttaaaggagtaacaaatgaaaaagacattaaagatattagcaggatttgtagctgttgtaattattatagcattaggaatttttacttctcgaaagttgtaccaaaatcatgtggataaaataaatcatattggtaaagttatggatagctacaaaggagtaaaggtatattataacgggaaaaaatatgctgaaagccatggcaaaaactatagtaaggatggatattactatggatataagtggcaatgcgttgagtacataaaaagattttattatgaagcaaaaggacacagtatgccaaacggatttggcaatgctaaagatttctttgacccaaaggtagggcagggaaaattaaataaggatagaggtttatttcaatataaaaatggagaaaatgaaaagccaaaggcagatgatattttggtgtttacggacacaaaatatggacatgttgtaatagttacaaaagttacagatgatacagttgaggttattcagcagaatatgggtaacaaaactagagatcagtttaaattggaatatgagaatggaaagtattttgtttgtgggaaaagaaaaccgaaaggatggcttagaaaaggttgatgaaaaaccggtaacttaaatacaataaaacgtattattggtaaagtacagtttaaaaaaggtctaggaaaggttgggaagatgatttctatattgaagggaggtcattttctttaagttgtggtagtcaatataaaaatcaacttagttaattaaaattagtcatactatcttgtagggttaagttttgaacgttttagttttataatgtaaataaccaaaagcattgtagggtaaaaagtgcaaaagaacaaacaaaaatatcttgcgtcaaatggaaatagccactggtgataagcatagtttggttcaaaatatatagagaaaaatagcataaataccccgcagagcatcaatgttaatttgaaatggtttattttaaatactgaatttatagttagtgcaatagagtttaaataaatgcatattttaaaaaatcctcctaaaataagaaagggtatgccaagaatatcaagacgatttaatacttcaactatattaattaatcttaaggtttcaactaaaggtatagttgaaacagaagtgtatttagcgcctaattctgatattgttacagcagttgaaatacacagaaggagtccagatgaaataagggctttaaaggtagtttttcttacggattttttgtcatttaagtagtgccaatatagcaaaagtacaaatacttctccaaaaggaaaccatataacaccaggtaaagacttaagtactggtttaatgccattacccaaaattggcattaggtttctaatatgtgcagaactaaaaaaaataattattataaacattgaaattaaaaaaattattgtaggaggaactattaattcagataaacggcatagagtttcaaagcctttaaaaagagtgtataaggcaagtaatatgtaggataatattataatccataaatgtatatgaggtagagaaattaacaatattaattcactaaattccctaagattacgtccgcaggcccaaataaaaaccatagcatacactatacaaaatggtaatcctagtttttttccaagtattatattgattatttctataagatttttatcaggaaatatgtaaaaaagttctgttgaaatccatgccatgagaagtccaattaataatgcgagaagaattacaatccatgcatcctgttcagcttcaataccaagtgcaaacaatggagtacttccaatttgaaaaataaaggttaaagtaaaaagttgatgtttgcttaaatgtatcataattatcccatcctattatataaagatttattatagtttaactcaaaatattaaaattattattttagtacataaaaatatttaatgagtaatagaatgaagtttagtatattgcaaaatatgaaagttaatagcagagcgtatagtagtagtagtatgtccttataggtattaatcgagtcactagagtgtacattgtcataataaaatttatacgtataaattaacaaataaaaccataaagtaaacaggaataaaatacatgtaattagcgaatgcattatataatccctgtttttatggttttcatgtgttgagaaagataaaatatgaaggtataattatgataatatgtacgtatatattatcataattatactagtttgtatttataagaggtgtttttaatggaaaatgaaaaaatattaaatcctattattattcaaagagcagatccaatgatttataaacacaatgatggttattattattttacagcatcggtacctgaatatgatcgaatagaagtaaggaaagctaaaacaatagaagggcttagaaatgcagaacctgttgatgtatggagaagacacgaaagtggagaaatgagtaatttaatttgggcaccagaaatacatttcataaatggagcatggtatatatattttgcggcagctcctgataagaatatagaggatgatacctttaaccacagaatgtttgtaatacaaaatgaaaatgaaaatccttttacaggaaattgggtagaaaagggacgaataaaaacggcatgggaatctttctctcttgatgcaactatttttgaacacaatgaaaagctttactatgtgtgggcacaacaggatattaacattaaaggacattcgaatatatatatagcggaaatggaaaatccatggacattgaaaacaaaacccgttatgcttacaaaaccagaattggaatgggagataaaggggttctgggtaaatgaaggtcctgcagtgttaaaaaagaatggaaagatttttataacttattcagctagtgctacagatgtgaattactgcatcggtatgcttacggcagaggaaaatagcaatcttcttgataaaaattcttggacaaaatcacaaactccagtatttaaaacaagtatggaaaaccatcaatatggaccagggcataatagttttacagtttcagaggatggaaaacatgatgtgatagtttatcatgcaaggaattatacggaaatcaaaggggatccgctttatgaccctaataggcatacaagagctcaaattataaactggagagaagatggaacacctgattttggtgtaccagaagttgatagcttagaaattgaaactccagtaaaagcataagaaaaaggtgggatatattatatgaaaatttttagaaaagacttttttaattttggaggattgtttttcttctactttttaatatgggcagtggtcctaacttttttaccaatgtggttaactgatgttgcacatttagatgcaagtaaagctggttttgtgttttcttctatatcactggttgctcttatatatcagccattctttggtgttattcaagataagcttgtgttcaaaaagtatttgtttgcttttgttgcaattttgatgctttttatggggccattttttagctatgcatatatacctcttctccatctaaatatatatgttggagccatcattggaagcgtatatttaagtgcatgtttttatgcaggagtaggtgttgtagaagcgtatatcgaaaaggttagcagaaataacaagtttgagtatggacatgtaaggttatttggttcaattgcaggtgcaacggcttcatttgttgggggaatactgtatataaaaaatcctgtaagtatattttggtttgcgtcgctgtcagcagtagctctttgtattttactctatgtagctaaggttaacgatactggtgaaagcaaagagataaaaaatcaaaaaagtcaaatcaataaggaaattgtgttttctattcttaagatgaaaaaattttggtttttggcattaataataataggaacagcgtgtatatacgatgtttttgatcaacaattccctaattattatgctagctttttttcaagtaaagcagttggaaccagtatatttagtaggcttgtttcatttcaaacgggtttagaggcagttcttatgatttttgctccagcacttgtaaatagaataggtgctaaaaatggattacttttgtttggaaccttaacctttattcgtatttttggaagtgctacctttacaaataccattgtgctgtcaggaattagattaatagcagcttttgagatgccattacttcttgtttcaataatgaaatatataacacatgtatttgatgtgcgcctttcagctaccgtatatcttttagggtttaattttgcaaaacaattagcagttgtaattttttcgtcaatagcagggaatctctattcagctataggttttagatatacttattatttcttaagtttggttgttttagtagttacacttgtaagcgttatcactttgactaatgataagaaaataaaaggattatcttctaatacagctatgtaaaggtttaatgttataagtatttgcataacttaatttctctaaggcaaaactagtataaaacttatttgcaaaaggggaattgaaatgagtggaataattaataacagagaatacagacaaaaggtattaaaggagataattctagagcttcataatggtaaaagtgttgatgaagttagaaaaaggtttcaggaacttataaagggagtttctacaaaagaaatatcggagatggaagcacagcttataaaggaaggaatgaaggtagaggagatacaaaggctttgtgatgttcatgcagcggtttttaaaggatcaatagatcaaatacaccatccagaaaaagaagaagggcatcctgtgagtgttcttaaaaaggaaaatgaagctgttaaaaactatattcagtctcatttaactcctaacctagaggaaataaaaaagtcagatagtcattctacaaggttgaagttaatggaaaatataagcatgctctttgatttagataagcattatagcagaaaagagaatttaatatttccttatcttgagaagtatggaataacagcacctcctaaagttatgtggggagttgatgacgagattagagaggccttaaaggaatgtaaggaagttataaatagtgcaaataaaacgccaaatgaaataacggaaaaagtagaaagtaccctaaaacggattgaggaaatgatatttaaagaggaaagcatactccttccaatgtgtatcgatacctttagtgaggatgaatggcttgatatagaaagtgaaagtgacgaaataggttactgcttgatatcgccgtctgaaaaatggaaaccaaaaagagaaaatgtagaggaaaaggaaaaaagtaaactggcaaatgaaaactctgaaggttatataaaatttgatacgggaatacttagggtaaatgagctaagtgcaattttagacactctccctttggatataacctttgttgataaagatggaacggttaaatacttctccggtggaagtgaaagaatatttgcaagaactagagcagttataggaagaaaggttcaaaattgtcatccaccagctagcgttcatatagtagaaaaggtggttgaggatttaaagagcggcaaaaaggatcatgaggacttttggcttcacatgggagaattatatgtttttataagatattacgctgttaaggataataaaggagaatttattggtgtgcttgaagttacccaaaatataaaagaaattcaagagataactggagaaaagagacttattgaatgaataaaataaagcctagtatgtttttaatgcatactaggcttttggctttgaagtccggtaattttatgtaaaaagtgaattgtcataaagggggcaatatataaagaaaggtatggattataatgtaaatgatgagagaagtttttattaaagtttattacagaggatactgtgactaattatagttttgtaaagttgagtatgatttacataagagaaatgcggaggtatttgcaaaaaataggaataaattataaaatataattattaatcaataatattcaagtttaagggggaaaataaatgaaaaacaaaaaaattgtaggctttatagctgctgcagcagttgcttttggattggggcttccatcaaatagccattttaacgcagatactgaaattggtatatcttatcaagggcatgtagagaatataggttggcaagctccaaagaaagatggagaagaggcaggaacagatggaaagggcttaagagttgaggcattaaaattaaacttaactaatgcaccagcaggagcacatatagaatatcaagggcatgtagaaaacataggctggcaggattggaagacagatggacaagaagcaggaacagatggaaaaggcttaagagttgaagcccttaaaataaagcttaaaaatatgccgggctacagcattcagtatagagcacatgtacaaaatgtaggttggcaggattgggtaagtgatggacaagaagcaggaacggatggaaagggcttaagagttgaagctcttgagattaaaatagttaaagtaagcgataattcaacagttggtgtaagctatgttgggcatgtacaaaatgtaggctggcaagagcctaatgaaaatggacaaatatcgggaacagaaggacaaggacttagagttgaagctctaaaactaaatcttgttaatgctccagagggagctcacataaagtatcagggtcatgtagagaatataggttggcaagatcctgcagaggatggacaagaaacaggaacagatggacaaggacttagagttgaagcaataaagattgcactagaaaatatgccgggctacagtgttcagtatagagcacatgttcagaatgtaggctggcaaaattgggtaagtgatggacaagaatccggaacagatggaaaaggtttaagagtggaagctattgaggttagaatagttaaaacacaagatggaagtacacctaagccggtggattttataccagtaaataatactccagcaccaacggatgatgattcaaacataccagaacctaagtatgagaataacaatataaatacggagtgggatttatcggataaattaaatgatgctatgggaaaaactaaaaatccagtaggaagttatgtatggtataataattctcaaaaacgtattagtgatgtctttggaggacttaatagtgatagcaataaggtggaaataggcgatatgtcaacagacgaaatgaaagcggatatagaagatagctataaagacaatgatggtggtttgtatacatctaataatggaatagtttataaggtggcaggtgtgtataaggagattaaatccactaagtcgaatgatttgactacgcttaaggccgctgcacaaaaattaaatactcaatttataacttctggttatgatccctcccaaacttttgatagattttatgtcaatacagatggttcaggtacacattgggtagttagagttttagcatattttacaaacaaataaatttaaaaacttctcatttaagtatgaggagtttttttgaaacaatttttaggaggtgaacttatgtatgatgataaaaaaattagaatacagaaaaaaagcattgtttataattattttatcaatttttattgtatctactattgaattttatgtatttgcaatgaatggtgatgattctacatctatacctgaaatagatggatggaaaaatggaagtacttatgttggaggggcggctgttgaatataatggttttcgcattggcaataccgtttggtgtaagcctggagatgtacttggtgtaacggcatggggaaaacaactttccaatagtagttgggataattgtatagagcatacttatatgagctttagtggtgcagatgtattcaataagtaccttgatgttcactatacagataaatttttggataactcttatactgaatatgcagcttgcgatatagctttaattgggtctgaaaatggagaaacaagcactaatgcaaaaatgttagattacttacgtattggaactatattctggtgccaatttaaagaaaacaacaaaacttacagtataagaactaatgaatattctaaaaatggaaattggctttatccagaagttaaaacgccagaagaagacagtcaaaataaatgggcatactcaattgaaaatattaggacggatggagatgcgcccagtgtaagcatttctccaaaatcacaagtgtggacaaataagcccataaatattgggattgatattaaagacagtggttcaggtatacaaaagtatagatattcaatatgtaaggatggtacttggcaggattacgactggatatacactgaaaatcattctaatttggataattccccatttgttagattgtatccagcttcctgtcagggcttaaatcataaaatagaaacttcagaggatgtacctaaagaaataactagttctgtaaatagcataagtaacagcatatatttagatcagcagggtgtatacaaagttagaattgaggcagtagataatttaggaaatgacagcgggtggcagcaaagcgataattattgtattgatacaacagcaccaaatggtgtttttacaccggatactcaaggcttaacagatggcgatgtggtagctagttttactccgaaagatgaaggcggttctggcgtaatgctttggagatatagattatctaaagacaatggcaaaacctttggagattggagcagtactatagaaggaagttctaaagaagatataaagttagttggagaagggcagtggaaaatacaagcagaagttactgataatgcgggaaatgaaggagaggtttacggcggaccatatgaaattgacagcatagtaacagtttccgcagctgtagctccaaatccagcaaagcaggggcaaatgataacattggatataaatactacaggaaatgcaaaatatctttcaatatatatgcctttagaaataactatgaacgatgagagaggaacgctgtttcctataaataaagaaataaaagaagaggaaaatcataatgaaaaggttcaatatataatacctttaaaaactcctgaaactataaagaacaaaattagagtaagagaaccttataaaataaatataatagccaaaaaagaagatggcaaaactgcaaactgtgaagtgaatttggatgttatgagaaatgtacttgatggcataaaaacagagataataggaacaggctttgacaaataagtctgagaaaagaagccttatcttaaaagcttcttttcttatgatttattcctttgttgagtttagagcagctgccattgaaattttagttatcttttttctacttagtaagtttgatatttcataagttaaatagattacaataaatcctataagaatgtaggtaaaattgagtttgaccttcaagcttaaattcatagtggaggtcatggatttaaacaaggcatttaaagaacctaataggaaaggaattccaagcaaatatccaagaattacaataaaagaagaactatttaatattaaagagtaaacctctttttttctgtacccaagtaccttcataagagatatattctctttgttttcctctataataagagaggttactacatatattattataagtccgattataaaggacatgagagaaatactgcccatagaatattgaagcggctttgttgctgtgcttaaggctgttttaaagtcatctatattagaagtgcttatgagtttgttttcaggtatatttattttattatcgctccacaatcctatatagcttccagatggataatttaacatagtattaaaccttgaaagaggcatatataagctttgagaggagtaagtatctgcaatgctgtcaatcctaatggtgtatacctttgagttaaatctatttataacttttattttatcattctcttttatattaagtttatctgatagagtctttgttactataactttgtttttatcaagggaatttcctgacctatcttttaataaaaggtatctggtgttgggatttattccataggctgtaataattgttttgttattagactttaaactaaaagcagtttctgaaaatttttcaccccttgaaggagaagttgtttgaaggctattaaaaatatattgatatttgtatttataagtgctagtaatggattcctgcattaaaaaatccatagagtttttagttgcaaaacctaaaagtaaaagcatggttgaggctatgattccaaataaaagaagaagacttctaggtatacttcttaattgctgtcttattttaaatttggaattgaatttgaaattatcaagctttaaatgcctttcgaaaaagttaactttgctattttctattcctccatgcataaggtcaacaggagaatgcttaagctgtttgtttataataaaatagcttgatataaaaagaaaaataataggtaaaagtatgcttattacaacatatttaatatcaaagcttaggtaattggttggaacattaaaataagaaaccataaaagtaaccattggttttagagctaacccgcctaagatagttccaacaatacctccaattacagctatagatagggagtatgttaaataatgctttcgtatttctctttttctatatccaagagcatacagtgttcctataattacagcctccttttgcagcatcctaagcataataattccagtcatgctgcaggttaaaagtagtattgcaattggcatagaggagcttatggatttagtgcttttaatttttgcagttacataggttactctaggattttcatctatatttgtccagcttaatacgtttatattttgagactttaagtagctttttaactttgaaatcttactatctatattctctgaattgttaaatttaatattgtaaaagctgctgcctaaatttaaactatcaaagttatttttagttattacagctatcccaaagcttttaggattattcataatatcgctttctgactttatggcatatatataattaggaagtgacattaaacctgaaacatttagttttttattcccaattgttattttatctccaacttttatattgtttgcctttgcataggaaggatctattaagattccatttgtagttaatttatttcctgaaattacagcaggaatgtcaatttttctattttcactgaaaattcttagtgttttgccttttgaaatttcgtaatcaaaactgccgcttttttctagcttcatgttaaacttctcttcaagtttctttggattattaatggttttatctactataaagctcgcatcatcttgaacgtagtttctttcaaaggaagaagtcattttatccatattgactgcaagttgattaaacatggtgtaaagcatacagcttataataataagtgctaatgaacctatatactgcgacttattttggagcatagttctcttgatttttttattgattaccatcaccactcaatcctttctgctggcaggatattttcattgatttcgtgttctacaatttttccgcttcttactttataaattctatttgccatgctttttatagcattattatgagttatcattagtattgtggttttaaaatccttatttatcctttgaagaagctttaaaatttccttagaggttgcatagtctaaagccccggttggttcgtcgcataatagaagttttggatttttaactacagctcttgctatagagattctttgctgctctcctccacttaattcttttggaaatctatattttttattaagcataccaacagcatctaaaacctcgtctatgttcaaaggagatttgcttatatttgaaactacctcaatgttttcctttgcagtgaggttagaaatcaaattatagaactggaatatgaagccaatattgtctctcctgtaatcggttaatttgtcatcgctaaactttgaaatatcagtttcattaattagtacttttcctgaatcgcatctgtctattcctccaattatattcagtagggttgatttacctgaacctgatggaccaagaataacaccaacttcaccgctataaagttccatatctatatccttaagtacctctgtttttacattgcccgaggtatatgatttttttaagttttcaatttttaaaaacattcattttgcccccattccatttttaagtagctcaatcattgctttgctgtgctttttatattcttcatattcctcatcaagaatattcattcctaaagcattattttttttaaataagtactcttttatttttagagaagcacctgtcataaacattaagatcaaatcgtcgtctatatcatctcttatatagccttgcttttttccatccttgatgagatttagggtgtagttgtttgaaacttctatcatgtttttagttgcttcttctgtaattgaaccatattttccaataaaggtattttgaatgaaaattataagttctctttcttcttttaattgaaaccaagtagcctctgcgctttcatatatatagtcaaataaattcatttttttttctttaaagcccgaaaaatttccgtatttttttaaaagtattttcgaggcccagctaatacagaataaaaacagttcctttttattttcaaaatattgatatatacttccttttgcaatacctgcatttttagcaatacttcctatattccccttttggtaacccttgtttagaaattcatctatagcagttcgcattattttttcttgcttttctatagcaaggttattaaaagttccctttggcaaaatatcatctccattatttcaaagtgtgacttctgggtcatatgacctacaagtcacattatattttccttatttatttatgtcaatatattatctataaaattcaacttaatttacatacttaaactacaaggtatatttaattgaagaaggagtaacataatagggacaaaaaattatttaggaggatgctatggcacatgaaatagattataaaattattggaagtgagatgcagattgttgaagtggaacttgatccatatgaaagtgttgttgccgaagctggagctatgatgtatatggatagttcaatagaaatggagactatctttggtgatggatctgacaagggaagttctggaggacttgtttcaaaacttatgggagcaggaaaaaggcttgtaacgggagaaagtctttttatgactatttttaccaataggggagtgggaaaacagaaggtagcttttgcagctccatatccgggaaaaattattcctatggatttgtctagctttaacaactatatgatatgtcaaaaggattgttttttatgcgcagcaaagggtgtatctattggagttgagtttactagaaaaatcggtgttggcttatttggcggagaaggatttatgcttcaaaaattagaaggagatggacttacctttgttcattcaggaggtactatagttcaaagagaactacttcctaaagaggtgattaaggttgacacaggatgccttgttgcatttactagagatgtaaattatgatatagaaatggtaaaaggaataaagtctgcaatctttggtggagagggactttttttagcaactcttaaaggaccaggtacagtatggcttcagtcaattccttttagcagattagcaggaaggattaatagtacagcagccacaggaaaagaagagggatctattttagggaatataggaaatttctttgacggagattagattttgtgggaaataagagtgaaggtaccttatttccttttttgcttaaggattatatgttgaaaaggactgtagcacagtatataattaggatttaggagcttataatattggaggacataaaataatgaatggaaagcaaaaaatacttccttacatagctgcaactgtaagttctacaatttttggattgagctttttattttctaaaatggctctaaaggttgcaggaccacttagtttagtggcattacgatttctcctagcatttattattatgactattttagttttatttagagttataaaggtagattataggaacaaaccaattggacaacttgttttacttggattggccgagcccgtaatatactttatatttgaaacctacggtgttaaaaatatttcatcttcaatggcagggcttatgctagcattaattccaatagttgtaaccattatgggttcatactttctaaaagaagtaccgtcattaaaaagaaccagctttattgtgctgtcagtaagtggtgttgcacttataggagttatgggaagttcaggtggaagtggtaattctcctataggaatattatttttattaggggccgttacttgtgcaggagcttatagtataatttcaagaaaaacctctgtacactttaaacctgtagagataacttactttatgatgttttttgctgcattttgttttaatataatggcagctattcagcttttagctgaggggaaaataaatgaatatttttctcctttaaaaagcagcacttttgttatatcaatattgtatttagggatactttcatcaattgtagcctattttttaactaactttactttatctaagattcaagcatctagatcttctgttttttccaatttatcaactatagtatctataattgctggcgttataatattaaaagaaagttttcatttataccatcttgtgggctcagtacttatacttacaggcgtatggggaacaaataaatttaagtagctaggtatagtatattttaattgtaaaagtgaagataatctttattttaatgggttcattgaaaatttggattaaccattaaatgatataaagtttaaaaatatattgtaaattatagggtagtgtgatataatgatttagtattaaaaacggataagattttaatactaagatttaattagatgaacaaacatatcctctttttaaaggttattttggtaatcagttaggatcttaatctttgaaaaaggaggtatatgtaaatggcagataagacattagtttgtaaagattgcggaaaagaattcgtatttactgaaggcgagcaagctttctataaagaaaaaggattcgataatgaaccacaaagatgtactgattgtagaaaagcaagaaaacaacagaacaacagaggattcagaagataataagtcttttataaaccctataagttaattcttatagggttttttaatatacattaataaatctatagacatgattatgttaaaactggtttgacaaagtatttttgttttattattataggaacataataaaagtttttaatagactactattaaaaacttttatccataggcaatctaatagagtgtatatataagttaaattaatacatcaaggaggagtactatgcattggagttttcctgaaatgataagactcttttcagatgaatatagaagcagtatgttgtcagaaggaaattttggagtagaaagggaatcacagagagttaattattctggagatttagcattaacgcctcatccatctgtatttggcgataagtttgaaaacccacgtataacaacagatttttcggaaagtcaaatagagatgataacaccaccgcttaaatcagctgaggaagtctacaaagcattaaatgatataaataatgaagttaaaaatgctcttaaaggtgaactattatggcctttaagtatgccgccaagacttccaaaggaagaggatataccagttgcacaatttccggatactgaagacggtagacaaaaacagatttatagaaatggacttgcacttcgttacggtaagaagatgcaaatgatatcgggtattcattataatttttcttttagcgacaagatgatcgattttatatataggcaattgagaatagaaaaaactaaaagacaattcattgatgagatgtatttttcgctgactagaaattttttaagatatcattggatacttatatatttgtttggagcatcaccaatatgtgattcgacatacaattctgttatatttaaagagcttgaaaaaatagaaaaatgctgccctcattgtgctggaaaaataaagaattttaatagatatgctacttcacttcgtgtaagtaggtttggttattctgatacagatgaaaagaagtatactgtgtattttaatagtcttagagaatatgaaaccaaaattaagaaaatgatggaaactgaaagtaacaaatattctaaacttggaatatataaagatggagttcagattcagttaaatggaaatctgcttcaaagtgaaagtgaattttatgctcctatacgttttaaaagaaatataaaaaaaggagaaacacagcttacagccctagtaaatcgtggagtagagtatatagagataagaattttagatgtgaatccttttgataaagttggcattagtgttgaacagatgaattttcttcaagtttttaatgtgttttgtctgtttgaagaaagcaagtcaatagatgaggagcagatggaaaggataaatacaaatcatcaacttgcagcgttacttggaagaaatgaagatttaatgctttataagtataatgatgattctagaataccgctaaagaattttggcgatgagatttttgaaaaactaagaatagttgctaaattgatggacaaagataatgtagaaaagaaatacagcgaaagtgttgaaagtgaatataaaaaacttcataatatagagctgttgccatcagaaagaatatgcagagaaatggataatgataatagaagctatattcaatttggcatggaatatgctgaagcatagggagcataagatttagcaatattttaattaacaaaccctggatactaaggtataattatttgtaaaagaggtggtaaaacatgaatgaagattatacaaaacttgaactttcaactcagatattaattaatgaagctttagataggaaaatacaagttgacatacttgatatggaagacaactttatacgtttaaaaaaaggtgataaagttgaatatgtgaaacaggcaactaaaacttcattggataattatatagcgcctttaataatggaaaataaagaagtaaccaaaatagttttaaaagagaatggtataaatgttcctgaaggagttactcttaaagaagcaagtgaagcgaaagaaaagttcagtttattttatggcaaagatacagtagttaagccaaagtcaacgaactttggaaaaggagtaattatactaaaacagcttagatcaattgaagattttgagaatgctgtaaatcaggcttttgaatatgataattccgttatggttgaagaatttatagccggtaaggaatacagattcttggttataggtgatgaaactattgcagttcttcatagggttccagcaaatgttataggggacggagttcacagtattaaagaacttgtagatgaaaaaaacaaggatccacgtagagggcaaggatacgtaaagccacttgagaaaattgttcttggaactattgaaaaagagtatttatcattttcaaatagggattttgattatgttccagacaagaatgaaatagtttatttgagagagaactctaatgtaagtactggcggagatagtatagattttacagatgagattcttgagggatacaaaaaaattgcagttagagcagctaatgcagtgggagcaaagatttgtggtgcggatataataataaacgatataaatgaagagcctaatgctaaaaaccacagcattatagaattaaattttaatccagcaattcatatgcatgatttcccttacagaggtgaaaataggcatgttgagagaaaaattttagatttacttggatactaaaattatgtataaagaaccgttttaaaatgattagaacattttaaaacggttttttatcatttagtttggctttttttatatatattaatgaaattatataacataatacttctaaataattgtattatagtaaataaaagttaaatacatataatattaatacgataaatataatatatggaaatagatgcctttaggcattttaattagaggtggtgtaaatgtcaaagaccgaaattataatgttgtttactattataggaataatcttaggtgtacttatcactatgctttcaatatttccgcttttaaagaaaaatggaataaaggtaagtgatatattagaagagactcaaaaagtagtagatgcttcagacaaggttcttggtgtggcatcagaagtatttcctaaaagtggaacagtaaatattttagaaattattgataaatgggcaaaaatagctgtagggagtgctgagcaattatctcatgcaggagatataagtaaagatgagagagcagaagttgcagaaaatgttgttctagatgtgcttaaggagttgaatataaatgttgatgataataagaaagcacttatagatgctgctataaaaaatgcagtaaatgaccttggacacagtagttcttcaaaggtcgtagtaaatagtacaagtaaatagaatatttaaaaaatcaaatggatatatttcgtttgattttttattatgaatagttaaaaacaagttttgtgttaaaagtatgtgaaaaatagctacagttgaaaacaaaatgtaaattctattaaaatatgttttttataaataattaggtggtatactataataggctcataatttatgagctttgaaaaaggatttattttattatagctttaaggcggaatggagaaaggttatggaaaatgtagaaacaaagtcaaaacaatctaaggcctctataattttatatgtagcagctgcagttgttgcaattataggaattgcacttttagtagataatattattgtttatagaaaggcacttagccagtatgtagcgcaaggttataaggcagctacagttaattcacagctagttccacaacagctattacctgaaatatttaatgctgttggtatttatggaggaatagcttttgttttatttggtgcaggaattataaataataaaatttcaaaattgttatcattacataatgattaagaaaaaacttctataaaagaagttgaataaaatataaaagagtggttaatagtaaagtttaaacttatgtgtactgaaatgatagtcattaagctatttcagtgcatataagttttttgaaaataatggactaaatttatagtaaaaggtacagattttattaaagtctgtatttttttacataaaaataaagaatattgtataaatcaatttaaataaaggaattttcagtgatataataagattaaatagaatttttatccaacaacatgaagctatagaaacatgcattagaaaggatgtttaaatgtgaaaattttagtatataatcatagagctgatgaaactgaatattttcaaaagtttaaagaaaaatacaatgttgatttaatgcttacagacaagacaccgaccattgaaactgctgattttgcaaaaggatttgactgcataagtattattacaactccaattaatgcagcgcttattaaaaagtttaacgacgttggagttaaatttatatccactagaactatagggtatgaccacatagatattaaaaaagctaaagagctcagaattggtgtaggaaacgtaacatattcaccaagaagcgtagctgattatactgtaatgatgattttaatggcaacaagaaaagtaaaagcaattatgcagaatagctatgttcaagattattctctagaaggtattcagggaaaagaattacataatttaaccgtaggagttataggaacagggaagattgggagaacagtaattaaaaatttaaagggttttgaatgcaacattatagcctatgatatcaatgaaaatgaagaagttaaagcccatgctaaatatgtgaaattagaagaacttttaatgagtagtgatgttatcacagtgcatgttccaggagcggaagataactaccatctaataaataaaaattccatatcaaaaatgaaagatggggtatttattataaatacagcaagagggtcaattataaacacatatgattttattgacgctgttgaaaaagggaaaattggtggagcagcattagatgtaatagaaaatgaaacaaatctctactataaaaatcttaaaggagaagtgttaggaaatagagaattagctgttttaaagtcttatcctaatgtgattattacacctcatacagcattctatacagatcaagcagttagcgatatggttgagaattctatactaagttgtatagctttttatgagggaaaagaaaatccttggaaagtgttataattgaaacaaaatatttttctgttatgtataggctaaaaggtgagtattaattaaaattagcaaaatgtattttgctttaaaaatagtattaactttacaaatattcaaaaagcatttatgatgaaaatatattaaatattgagaggggacttaagatttagctatggattatagtgagttagtttataaagctttagaggctagaaaaaaggcttatgcaccttattccaaattcaaagttggagcagctgtgatagctgacaatggagaaatatatacaggatgtaatatagaaaatgcatcctatggtgcaacaaattgtgcagaaagaacagctatttttaaagcagtatcagaagggcacacaaagcttaatgctattgctatagtgggagtagaaaaggattatacatatccatgtggaatatgcagacaggtaattgctgagtttgcgtcagaggatatgaaaatagttttgggaaaaaatagtggagaatatatagttaagacattggaagaaattctaccaggagcttttactaaagaggatttaaaaaagtagtttaaataaagtgtaagataaaactattgttattggtcgaagttataaaatgagaggaagatttttaatatgaatattgctaaaattatagatcatacagcattaaagccagatacaacaaaggagcagatactaaaactaatagaagaagctaaacaaaataactttgcatcagtttgtgtaaatccaaagtgggttaaagaggcaagctgtgcattaaaggacagcagtgttaaagtgtgtactgtaatagggtttcctcttggagctaatacaactgctacaaaagtatttgaaacacaagatgctattaaaaatggtgcagaagaagtagatatggttgtttctataggagaattaaaagataaaaatgatgattatgtagaaaaagatatagaagaagttgttaaggcagctagtggaaaggccttagttaaagtaattattgaaacttgtcttcttaccgaagaagagaagataagagcgtgtaaactagctaaaaaagcaggtgcagattttgttaaaacatcaacagggttttcaacaggaggggctaaggcagaagatattaaattaatgagaaaaacagttggagctggtatgggagttaaggcctcaggtggtattcatacaagagaagaagcaattaaacttatagaagctggagctacacgtattggagctagtgcaagtatagatataatttcagaaaattaaatgaataacgctttttagaaaataaatgcaagaggtggaaagagcatgagaatggtagatataatctcaaaaaaaagagatggaggagaacttacaaaagatgaaatttatttttttgtaaatggatatacgaatggaacgattcctgattatcaggtaagtgcacttacaatggctatttattttaaggacatgactgaaagggaaagagcagatttaacaatggccatggtgaaatctggagaaactgttgacctatcgcaaattgaagggataaaagtagataagcactcgacaggcggagttggagatactacaacacttgtactggcacctcttgttgcagctttaggagtaccagttgctaaaatgtcaggaagagggttaggtcatacaggaggaactattgataaactagagtctattagtggctttaatgtagcacttacaaaggaaaagttcgtagaattagttaatcgtaataaggttgcagttgttggtcaaacaggcaatttaactccagcagataaaaagctatatgcacttcgtgatgtaactggaagtgtagaatcaattccactaattgctagttctattatgagtaaaaagattgcagcaggagcagatgcaatagtattggatgtaaagactggtgcaggtgcatttatgaagacggagaaggatgcggaagaactggcacatgctatggttaaaatagggaataacgttggtagaaaaactatggcagtaatatcagatatgtctcagcctttgggttttgccgtagggaatgcacttgaggtaaaggaagctattgatacattaaaggggcaaggaccagaggatttaacagaacttgttctaactcttggaagtcaaatggttatgctagctaagaaggcaaatacattggaagaagcaaaagaaaagcttgtagaggtaataaaaagcggtaaagctttagaaaaatttaagctgtttcttgaaagccaagggggagattcatcaattgtagataatcctgaaaagttaccgcagtcaaaatataagattgatgttttagcaaaagaaagcggctttgtttccaatattgtagcggatgaaattggaattgcagcaatgcttttaggtgcaggaagagctacaaaggaagatacagtggatttagctgttgggcttgtacttaacaaaaaagtaggcgataaagtgcaaaaagatgaaccaattgtaactatttattcaaatagagaagatgtagaagaggtaaaaaacaaaatttataagagtatagcaatttcaaaaaaagctgtaagaccagtgcttattcataaaattattacagaataaattttcgtcattaaaaagccctatattcctagaggttcaacttaggaatgatagggctttttttatttttgtagaataagtagcataattttcaaaaataagtattgacacaacttaaatttaatattataattcaattacactcaattagattgcgcacaattaaattttaaaatgttatatgggaggcaatgaaatgatacaagagattaatgataaaagttttgtaaatgttatttccaattcaaaaaaggttgtagtagttgatttttgggctacttggtgcgaaccctgtaaaatgatagctcctatacttgaagaaattgcaggagaattaaaagaaagtttagagattataaaaataaatgatgataaaaatcgtgaggctgtagataagtatggaatctcaaatataccaactatgttaatatttaaaaatggtgaattacaagaaagtcttacaggatttaatcctaaaaataagcttaaagaggtattttccaaatatatttaaggagtggatttctatggacagatatgatatagcgataataggaagtggacctgctggattgtcagcggcaataaacgcagtcataaggaataaaaaggttatattatttggaagtgataacttaagcaataagcttttgaaggcacctaaaataaataactatcttggaatatacgatgtttcgggaaaagagcttaaggaaaagtttttggaacatctaaaatatatgaatatagaaataaaaaatgaaaaagtgaattcagtatattccatgggagattattttgcactttcattaaatcaaaagatgtatgaagcaacttccataataatagcttcaggagtagaattttcaaaacctttaaatggggaagacgaattacttggtaaaggagtaggttattgtgccacttgtgatgctccgctatataaaggtaagactgtagcaatagtagggtatactaaagaggcagaggaagaagctaattatgtaagtgaacttgcaggaaaactttattatatacctatgtataaggataaagtaagtttaaaagaagttatagaggttgtggaagacaaaccaattagtatattaggtaaggacaaggtaagtggcttacaaatgtcaaaaggtgaaattaatactgatgctgtatttataataaaagatagtgtatcacctggtaagcttgttccaggacttttaatgaatggagaacacatagcagttgatatagatatgaaaactaatatagaaggatgttttgcagcaggagattgtgccggaagaccctaccaatacataaaatctgcagggcaggggcaaatagcagcacttagtgcagtaagctacatagataaaattaagctaaataaaaaaataatataaaacaaaaatgaagggaggaagattagattctgtataataaatatctagaatctaattgaataattatgtcagtatatgattttaaagcaaaaacaatagaaggaaaagaggtatctttagatacttataagggaaaggttttaataatagcaaatactgcaagtaaatgcggatttacaccacaatatgagggacttgaaaagctgtataaagaatacaaagataaggggctcgaaatattaggcttcccaagtaatcaatttgcagaacaggaaccaggagataataatgaagtaaagaatttttgcaaacttaattatggagtaacctttcaactatttgaaaaaacagatgtaagagatgaaaatgcacatcctttatttaactacttaactgagaatgctccatttaagggatttgatttaaatcatccaacaggaaaaatgctttcagaggttttagagaagaattttccaaagttcttagaaggaaattcagtaaaatggaactttacaaagtttttaatagatagagatggaaatgttgtaaaaagatttgaaccaacttctgaaccaagtgatatggttaaagatatagaaaagttattataaaatttgaagaagggcaatagcagaatactttatgctattactcttcttttttattaaataattttagatattcaccatacccctcttcttctaaggcttcttttggaatgaattttaaagaagcgctatttatacagtatcttaaaccgcctttatctttaggaccgtcatcaaagacatgaccaaggtgagaatcgctatctttacttctgatttctatccttttcatgttatagctaaagtctgtattagcttttatattttctttgacaattggtttagtaaagctgggccacccgcagcctgaatcaaatttatctaaggatgtaaacaaaggttttccagaaattatatctacgtaaattccttcagatttattatcccaatactcattattaaaagggggttctgtagcattattttgagtaacctcatattgtaatggagttaattttttagataaatcatcttttttcattctactctctccttttgttttatagaaatagtatatgcatataaattatctgtaaactttattttttattttaaatgattcagtaattttatggtaaaataagtatatcatatatgcagggaggtatgtaaaatggatataataaataatagaagaagtataagaaattacaaaggaaaaaaagttgaaaaagaaaaaatagaaaagcttttaagagcagcaatgcaagcgccatcagcagggaatcaacagccatgggaatttatagtgcttgaggatagagaaaacatagataaactctctaattttagtaaatatgcgaactctctaaaaactgcaccactagcaattgtacttttagcagatgaagaaaaaatgaaaatttcagaaatgtgggagcaagatatggcagcagcagctgaaaatattttgcttgaggctgcttacctagatttgggagcagtatggcttggagctcagcctattgaagaaagagtaaaaaatttaaaagaaatgtttaatttaaaatcaaatataaagcctttttgtgtaataagtgttggatatccagaaaatagtgaaaataaatttatagacagattcgatgcaaagaggattcacatagaaaagtattaaaagtagataatatttttaaggttatttgaaaaagattattgttacacaagatcattacttataggagcgcaatttgtagttgggctccttttaaatcttcataaaaactacaaaaaaagctattataataggtaaggtattaaaatacttaggagtgaattttatgaaaaacatattggtagtagaggatgaggagaatgtacttgaaattgtaagagcttatcttgaaaaagagggctacaatgtatattgcactacacaaggacttgatggaatagaattatttaaaaaagtaaagtttcaattagttattttggatttaatgcttccagatattgatggggaagaggtatgcagaatattaagaagaatttcagatgtgtacatatttattttaacagctaaagtagctctaaaggacagaatagaaggattaaacatgggagcagatgagtatttgctaaagccttgcagtccaagagaacttacagcaagggttaacgctcttttcagacgagtttttaaggatgagaataatactgattttgatgatggaaatttgcaaatatgtagtgataaaagaatcgtaagaattaaggatcagcaaataagtttaacccccaatgaatttgatatactatatgctttagttttaaataaggggagggttttaagtagagaacagttaattgagagggtatttggtttagacttcgatggattcgatagaacaatagatgttcacataaaaaatataagaaaaaaaatagaagaggatacgaaaaaaccgaaatatattataactgtaactaaacttggttataaatttggtggtgatataaaatgaggagtataagaagagaagttagcattatattgatattatgtacaatatctggagtgattctatcagcactttttgtaaatatagccatgaatgctacttttaataaatatatggttaatattcaaaagcaaaggaatagcagaattgtaagttattttgaggaaatttataagagagacaaaaggtggacacaaaactctggagcagaaatgatgcatgaagcctacatgagtgattattgcctaacgttaatggataattctaaaaaagttatttggggtatgaatcctaatgatattagaaacagcaatcactggattatgaaaactgaaggtaaaggtgtatacagttccaaaacctttccgataaaggttgacggaaaggtagaaggctatgttatggtagggcaatatcatgcagtcatattatccgaggcggatatcaactttaagaattccataaatcaaggtattggtttaagtgctcttgttgctattattattgttgcattattaagtttaattgtatcaaaaggattttcacgtccaattaaaaaggtttcagagacctcagtccaactatctaagggaaattacgagtttaggtctgaaataaaaagcaatataaatgaaataaatgatttaataaaaagtattaatatgcttggaggaactttaaagcaccaaaatcttcttagaagaaggcttatatctgatatatcccatgaaataagaactccgcttaatgtgctacaaaataatctagaagctatgatagatggaataatacctgttacagaagataggttagttaaattaaatgaagaagttataaggtttggtgagcttttaaataatttagatttacttaaaagatttgagactgaggagagttcagtgagtatgaagaaaatacccttagataagattataaggggaatttgcaaagaatttctcaatgttgcaaaagaaaataatatagaaattcatacaaatatacctgagggctactatatgattttaggtgatgagaataagttaaagcaagtatttataaatttattatccaattcagttaagtttaataataaaaagggtgatatatggatttctcttgatgaagaagacaaggaaatagtagcaaggataaaggacaatggtattggtataaaaaaagaggatttgccatatgtgtttgaaagattatataggggagataaaagtagacataaggctattggaaacggaataggtttatctattgtaaagactgtacttgatattcatttagcacgcattgaagttaaaagtgaagaaggaattggatctgagtttacaatatattttcctaaagataaaaggaataattaaaaaattattccttttatctaaattacctgcctaagtattttgttcttatttgttctaaatctgaagtatttaaatcgtctactacttctaatgcttctatcatgttattgtctttaacaattccataactaccgctagtatctattttaaaatctacttccacgatgcctttctttccattaaaggtagttacagtttggcgtgtatttaaatctataatagaatattctccattagggttatcaaaaccgtttaaatctacacttaattttgtctctactcctttatttaaaacagatataagaggttgaaattcgtagccctttcccgtaagtgttagagactgagaatttccatttaagttagccttattaaccaagttagctgtaggaacctttgatatatcactgccataaatacttgaagcttgggagctagaagaggcagagcttccaccagtacaacaactcattccactgcttggttttggaattgaagaatctttttttgaggtatcaactgaagctacattgtcaacaacctttattactcctctaatcatgcccatagaacaactgaaagaaatgtccttgccctttggagtaaactcaattacattctcacctgattttaaagtgatctctttgtttaaatcaggaataacaattgttccattgcaggaatttaaggacttcccatcgataatccacttaacaggtttgtttttttcaacatacaatccatttggggtatagccattttcatcagctgtcattttaattacctgtactccattaacaatttttgctttagaagctgagttgttagtgtcttttgaaggtgaagccagaacggagttctttatgctactaacagtaggaacattaacaccagcaagagctaatccacgtccacccattattatacctagaaccatcacaagaattccgctgaattttaataaaactttagtacttcctttgcttataaaacctgacaaaacaccaaaggtcatcattaaaggaattgtacctagggaaaatacaaatagggatagtgcaccctttataggacttcccgtacttaacgcataaagctgcatagtttgcagagggccacaaggcattaaaccatttaacataccaataaagaatggtgtctttggagcttttttaaatatgcgtcttggaaaaggtaattttagttgtatttttctaaaaagactaaaaccgctcatatttagtcccataataatcataaatgcggctgcgaatatctgtaagaaagattttaagcccagtgaaagattaaatacagaaccaagagcaccaactattcctcctagtatagtataggataaaactcttccactattataaagtatagctgattttattgaagagcttttgtttccttctttggtaatactttgagaaagcagtataccgccgcacataccaacacaatgaatagaagttagtactccaacaataaatattatgaagtatgtagctccttttagctttgaggttatatcaaagccagaagtagaggtgctcataaaaaccataaatagggcaattaaagcaaatccagctattttgtaaatatttttagcttctgttctgtaaccagcactatttatttcacttttgattttttgtattgtgcaaattgtatcatcatattctatagtaacaatttgtttaacgaaactggctttaacagatataacaccagggagagtttttagtgctttttcaatctttttttcacaagaggtgcaggtcatatcatatacctttatactatctttttttatactcatttcaaacctccataatttaattatagcaatcaatttcatatgctaattgtattaaatagttgtgtagattttatgaagaaatattatattttaggattttttagtaaaatatagtataaagttatatttcttatatgtatttaagacatttgtaatagttttaaaacttgtttaggttcctgtagtgcttgtgccattagaatatcagatgccttacttaatatgctgtacttaaaatattccatagtttcctctgccatatcaacatcggtaattcgtgaataagaacttgttagattgcattcttcattttctaaattgttaattctaaaatcaattctattttcatatgaacctatctcagctctagatcttgaaaccgaattgatggcttgttgaataacagaaatagatgatttagcattttgaggagtatctacatttattttagttccatttattatatctgcaagagatctgcctatattaaaataggacatatcgatatttagaaaatcacatggagatgaattaggtcctccttgtattgttacatgtgaagatgctgatagtaagtctataccattaaaatttatggagactgatatgtgcttgacttcatcttctaattgttttaattcatcttttatggagtttctatctaagctacagtttgtgccattagcagcttgcactgcaagttcattcattctttgaagtatattttcagcttcatttaatccaccttcagcagtttgaagcatggaaaagccatcttctaagttgcgttttgaagcatttaacccccttatttgagctttcattctttcagaaataccaagacctgcaggatcatcctttgcagagtttattctcaatccagaacttaatttaagggaagcttcattaaaatatttttcatttatatttgaatagtaaagaattttagcagcattcaaattatgagcaattatcatgttattacccctttttaaatatttattagctacaatataattatcgtatttacatgggataatattacacttaataaaaaaattaggtgccatgaaataggctgcagaaaaagttgctgcagccataaaatattacctattaaattttgttctaatacttgtccaataatcgctattttcaagtccaagtctccatatagcaactcctgataaattgtaggaattaataagatcaagtttataattaaggctttgtccattttcaaaccatacactatgattaattccagacgaatctacataatagaagtaaggagattgtgatgttaaatcccagtttatagtagcattataagttgatgctaaattatatgttccggaaatgccataggctttagtaggattagaagaccaatcgtagccataggcagcagctccaagcataatctttgtagtaggaataactgttatagcatatttaattacattttcaacccaaccgattgaagctataggtccaggagagcctcctccgtaatgttcgtcataagtcattaatataacttgatctgctgctttagcaagggcagcataatcaaaagcaccgttccaagcagctgtagggctgtcactagtttttgcaggaacgcaaatagttacgtaaaaaccttgtgggttaagtgtactataaagttcattcataaaagttgttaaatagcttctgtcataatagtaaaccccttctaaatctatattaactcctttataaccatttgcctttaaagaggttaatatattgtttattagattttgtctgtttgtactgttttcaagtaaagtttgtgctacagctccatcaaaattgttttcaattgtagcaagtgttttgataccattattatttgcataagttacttggtttgttggaactaatcctgaaatatttccaacaccatctgttgtataagtatgagttgcaatctcatcaattgtacttgtgtttgcagctattgaattataagaagatgtatctcctgaataataataagttgtaaatccaagtactagttttttagaagctggttgtgtagttaaagctgtagttgtaacgcttatgtgtgtagagtcagctgaaataccataggaattataagctcttacaaagtaccaatattttgtgccggaacttaaagaagtatttttgtatgtattggtagacactgtggctagcaaactataatttgaatcggaagatattgctctgtatatcctatagccagaagcacctgaaactgtttgccagcttaaggatatgtcactagaggttacagaagtagcagttaggcctgtaggcgctggcggagcagtttttgctgtggtttttgtgagaggctttgcaaatgcaagtgtgccgttgaaaatgattacaagcataacggccaagaatgttaaaagttttttacgagtactcaaggtatattcccccttcttaattttataataatacttctatatcgaataaaaatacaatgagttcacaagtaatttatagcgattataccaagttttctagtgagttacattaaaaaggtacataaggtatattaataatttattcaaaaaactgtaatgcggtatacggaagttattgcaagccttacataaaaggaataaaattatataatgaaagtgtacagtacagagattaggagaaaattatgaaaagatttattattaaatcggatagaattggtttttctatttgggaggagacggatttaaaggaagctttggagctttggggaaacagcaatgttacaaaatatattactgcagatggtaaaatgtcaatagaggatgtaaaaacaaggcttaaagtagaaatagagttttatgaaaaatataaagttcaatattggccaatttttttaaatgagacaagtgaaaacctaggtgtttgtggattgcatccttataatattaaagatagtgtttttgaattaggagtacaccttagagaaaaatattgggggataggagttgctgaaaaagcatgcaatttagttatgagatatgcatttgaaaatttacaagccaaggcaatttttgttggacataatcctaataataaggcatctaaaaaattgatcaaaaaacttggctttacatatacacatgatgagttttatgaacctacaggattgtatcatccttcttacttaattacatgtaatgagtttattgaagtaaagaataagcttaaagggggaaagataattgggaaaaataagtagtcttttcaagttaagaccattcgttaaaaagtatcgtggcatttttgtacttggtattttaggaatgattataagttctatagtacaaacccctgttccgtacataataggttatttgatggataaggtgcttttaaataagagaagttataataagttatatatgtatattctcataatagcagtactttatatattacggtacataatttcgtatctttccaaaggtgtattcgtaaaggtgagtaatctagttgtaaatgagatgagatgcagcgttatggataaggtaatgaacttacccatgagttatttatctaaaacagaaaagggctatgttcaaagccgaataaatgaatgtaactctataggaaatatattttcaccatctattataagtgtttttttaagtattatagatgctactttggctatgataactatgtttttagtaaattataaattagcgtttattgctcttttattggcaccagtttttttctttttgtcaaaattatcggctgaaaaatttatgaaaaatacaagggcgatgatggaatcaagtgcatttttaaatggggaatcttttgagataatgaatggaatagaagatattaagattttaaatggtaagaaggataagcttaataaattcaaagaaaagttagaggaacttataaatgttagtataaaacagagtaagtctatagttctctttatagaaaatacacaagtagtaagtaactttggttccctcataattttacttattgctggaattttaattttaaatggacaattcacaattggtctttatacttcgttttctatgtatataggcaaagttttttcaagtgctggagctattgctacaatgggaacaacaataaaacctgtatgtcttaacatagaaaggctttatgagcttttagaaatgaaggatgagaattatggaagagataagttcatagataaaaaaataaaagatattaaattagaaaatgtgagttttaagtatgatgaaaataagactgtactaaaatcattaagttttaggataaaagatggagaaaaggttcttatcaaaggagaaaatggagcaggaaaatcaacgcttattaaactcttattaggactttatagtacaacttcaggtaaattattatataataatgtagatataaatgaaataaatactgaaagtttaagaaaaagaataggcatagtatctcaaaatatatttttattcaagggaacagtactttctaatatattatatggacaaactggtaaaagtataaaagatgtagaagagataataaaaaaactaagcttagaggagtatgtaaataaaatgcctaaaggtctcaatactgaaataactcaaaatacttcaggagtttcaggtgggcaagctcagataatagcatttataagagcaatgcttggagaaaaggatataattattttagatgagcctatttccaatgtggatgcgagtactcgagaagtagttatgaatatattaagtaggaaaagctttggcggaatacttatagtagtatctcatttaattgaaggaatggattttataaatagagtaattgaaatatagataaataaaaaatacaatcagcgagaaaaagtctttaaacgaaagatttctcgctgattttttatgaataaaaataaatccgtataaactataaaatcgtgttatcatacaacttttgatttgtttttgaaatattgctgggttattaaattgaattttacttttggaattgataatatgctttcataattttattatattttaataaaaaacataataaaaattcgaaattgcaaaaatgtgtaaaataaaatgaaaaaaaacagaaaaataataaaaacatataaatatgtaaaatattgagtcgaaaaatagtaagagaattgaatttttatataaaaaatagtaagcttgctattttttaaactttatttgtttttcaaaaaagaaatagtaagcttattatacttcatgtttataaaatctgtaatatcttccttgacggaatcaggcaattgacgaaactttactattaaatttgattcttctggttttagagttaagttgtttgaattttttttatctgtagataagatataatctgcatcaacgttataaatttcacataatcgaatcaaagtttcaaggtcaacacgtgtacggccggtttcaaagctgcttattttttggaaggtagatccaattattttggctacatctgattgttttaaatttgcgttttcgcgtgctgcctttaatttacgacctatttcatgcttaaacatttaaatatcacctccattccattattttaatctactcaaatatgcactgtcaacataaaattcaacaaaataacgaaaaaatattgaaaaacaacaaattttagagtattatattattgtattcaacaaaatagagaaaggaggaacagaatatgacatttgacgagcaatttaagatagaactgaaaagatatatgcaagataattttattaacccaaacatacttgcaagtaaagctggaataaataaacatgtttttactgaaatacttaataatacgtctcgcaaagtatatggagatgaagttgctggaatatgcaatgctacgggattaacccttaaagaaatactaaaattaaataagaaggacaacccatatgtaagtatgaacaaaagcagtgctgttcacagaacttaaaaatcaatttgctcaattaaaaattgttgaataaaaaaataaaaataaatattatatatatcacgatttaaatattaatacctagattaaagataagaataataaagattgttgaaaatactatgaaatattaacataattaaaatttgctcttacattatatgggggtctaacttaactgtttattatgtgggattataaatgaggaattaagttaaggttagttcccttatataaggtttttaaattaatttttgaaattttaatatgtattagtttgaatgttctacattattaaatatgtatgaatggagcttttattaaaaaccatagagcaatgaaatgaaaggtgggaacttttggtttttagatattactgatacatgtaaactgaaaactagagtgaattatgaaattaaagaagcataaaagtaatgaaaaacttttaatttgctgcacggtaatttttaccataatttacctcgtatggagaattacatgcacattacctttaggaggtacaatagtatctcttgtggcagcaattatacttttagttgttgaaataatgggtgtgtttgaggcggcagttcacttttataatatgtctaatatagagcaacctgaaagaccgaaggtttcagaggatttatttccagatgttgatgtttttattgcaacttacaatgaacctagagaattattgtataagacaataaatggttgcattaacatggattatcctgataagaagaaagtacatatttatttgtgtgatgatggcaatagagacgaaatgaaagaactcgctgattatatgggcataaactatataacgagaattgaaagaaagggttcaaaagcaggaaacttaaataatgccatggcacattccaaatcaccacttatagcaacctttgatgctgatatgattcctatgcatgattttttaatggcatgtgttccatattttcttacagaagagaaggttggatttattcaaacccctcaaagtttttacaatccagatttgttccaatataacttgttttcagaaaatagaatacctaatgaacaagattatttttacagagatattcaagttgcaagaaataaaacaaactccgtaatttatgggggaacaaatactttaatatctagaaaagcactaaatgatgttggtggattctatacagatgcaataactgaggactttgcaacaggaatatatattgaaagcaaaggataccattgctatgcaatagatgaaatacatgcatcaggtcttgcaccagaggatttaaaaggccttgtaaaacagcgtgaaagatgggcaagaggctgtatacagactggaaagcgtttgaatatacttggtataaaaggtctgaacttaaaacaaaaactaaattatttgtcatctatttcatattggttttctggaataaagagatttgtttatattctttcaccaatattattttctgtatttggagtaatagtagtaaaatgtaatcttccacaggttctaattttttggcttcctatgtatttattgacaaatgcatcacttaaaaggctatcgaaaaatataagaacaaataaatggacaagtatatatgatactattttatttccatcacttattattccagtaattttagagactataggtatatcacaaaataaatttgctgtaactagaaaaggtggagctgtcagtgataagtcatatcaaaggaagaaggctattccgcacattatacttgcagttttatctgttataggaataataaattgctttaggctaatatttgcaaagaatacactagcttacgcagtggtattattctggttagtagctaatttatataatatattaatgtcggtattctttatgctaggtagaacacctcacagaaaatcagaaagagcttctgtaagcatagattgcagtattaataagaatggaaaagaagtaaaaggcgtaacaaaagatatttctgaaggtggagtttctgttgttttagatgagccaatagatttatatgaagataattcagttggaatacagttgttaacagatagatactcatgtaattttgaagcggaagttgttcacgtggacaaggttcaagataaatggaaatatgcctttaagacaactggaattgaagaaaatgattttagacaacttctttatataatatatgatagagtacctgtacttcctaagcacataagcaagagtaacagtatttttgatgatatacgattgaatgtacttacaagaggaaaaaaggttaatcaatttaatagaaaacatccaagacttgaaataagaaagaagcttcagtctgaagaatgtggagaagtggaaattatcaatttcaattatgaatatgcacttgtaaaaacagattctgaatacaacaatataaagcatatcaatatttctattttgccagaagttacaattaagtgttcacttgataagaaaatggattatgaaacaaataaaaagaaaaaaaataaaccagttgagcagtctattcagctttatagaattgataattacagtgaaatttctgaaattacagaacttcaaacgacattaaataaatgggcaaatgagtatgaggctataaagaaaatagaaaataagaagaaaaagaaggcaggtccttctgatgagctcaacgaaatggcatatttataaaatggaggtataacatggcttttaataaagtattcagaaaattattagtttctttttctgtgatattttttattactggaagcagcacatttgcaagacaaacacacgcagctaatattcctctagaggatactagaattgcaggtaatgcaaatacaaaaattacgcctagtaagacaggtgactcaatagatgttagtgcaaattcagataatttgaaaaagggatattattcatcagttatatacaaggttacagatgagaattggtctaatagtggagagttttcatttagcattaaaaataaatctaaagatgctatgctgatgaattttgtttcacagttaaaagatggtacaaaggttgctgtttcaaacagtggttttgtaatgttaaaacaagatggaactaacttagtaaaaagagttagaacatcttacggagaatttgaaattccaaagggattcacaggaaaggtatatatacctctagacgggttagagaaagatggtgacgttaaaaataaaacagattacgatctttctagtgtagtgtcttgggcattagtagcaactatgcaggagaatgaagaaaagaattttgaggtaagttcagtaggcttgcttggaaaatcaggggaaatatataatgatggtaaagttaattttgtattatcaggagattcagatgttcaggtacctgttctaggagaatctatatcattatataaagctacatctccaggattagatcctaaaacaataaagtataaaattgaaaatccaatagatggtattagaataacagatgaaggtagacttataatatcaaaaagaataaaacctcagaatataagcatccttgtttttataaataataacttggctgaaacaaaaacagttagactttataattcgtggactttaagtattaaaggaaaaagtctaccagatccttctacagtaccaagcttaatgaccggattttataaatttattttaaatggatacacaatgaacactataagagttctttttgttgcaatagctgcagcatttggtggtttgtttatgttttggaggaagagattcgctgataacgagtaatccataaatttaaggaaaaatttcgttatgaaaaaagattttattagtaatattacttttaattttcataatatgcgatatatctttaaaaaatatgagtgaaatagcgaagatttcaaaggaaaatagtattcatctaaaagaagagatatcagaagtagattcaagaaatgtataaaggtagaaagttaattggaagcgcaaatgatattaaatgggatactgaagttgagaattactactttaatctcataagaaggttggatttataatgtaagggtttctaattatactaaagatttttataaattatattcttgatgaaagctttatgaataaagtagatgaatatattaaatatactttgaaggataatctaattgtggtactagactttcaccattttgagaagataatggagaatccggaaaagtataaacaatgttttttaagtgtatggagacaactctcaaaagggtatgagaactaccataataaacttatgttacaagtttttttaaaggaagagttgtgaaatcagtattatgaaccaaattcattcacatttcaggcaaatgagtacttagtgtttcaaaatatgaaaatgtaagatgagcgggtactaaaaatgaagttgacaatataaaaaagaaatttgatatggttcaaaaattggctaagaaaaaacaaagtcaaagtattcatgggagagtttgatgataacaaattggctccgtcgaatgatagactattgttggacacaggccgtaagaaagcaagctgaaaatcacggatctacttgaggaattgagggctttgttctcaatttataatataagactcaagtgcacgaaaatgggattacgacatgcttcatacacttatacctaaaaagaataaggagagatagatagtgttattttcaagtattgtttttttattttactttttcccagcagtcttgcttttatactatatttgttctttttcaagaagattacaaaatgtagttctactttttgcaagcttggttttttacgcatggggtgattttagtttcttaggaattatgattgtatccataattataaattatattttgggtctcctggtgggcaaatttagagaaaagaagcttcttgctaaattctttatttttgtaacctgtgcatataatcttggcatgttatttgtatttaaatatttaggatttgttgtaaagaatatagataaagtaggaaattataaactcagtattcctaatatagctcttcctattggtatatcttactttacatttaaagctatatcttatgtggtagatgtatataaaaataaggtagaagcagaaaagaatcctttaaatattggattatatatagcgtttttccctgaagttatttcaggacctatttcacgttatgttaaagttggagaacaaataaaaaatagagaacatagttggcagaaattttctgtaggagcttgcagatttattaccggattaggtaaaaaagttttaatatcaaacagtgtgtcaattatagctgataaagtttttacaatgaacacaaatggtcctgtaccagttactttggcttggttaggttctattgcatatacaattcaaatattttttgacttctcaggttattctgatatggttataggtcttggacttatgttcggatttaaaatcgacgaaaactttaattatccttacatatcaaaatcgataacagaattttggagaagatggcatatatccttgagttcatggtttagagattacatctatattccattaggtggttcaagagttgacaacaaggataagctaataagaaacttattcatagtttgggttagtacaggagtatggcatggtgctgagtggacttttataatgtggggatttttaaatttcgtattcattgcgttagaaaaagtattctcatttgatgaccttaaaataaatcctgttatcaaacatatatatgctctttttataataaaccttggatgggttctatttagatcagagaacttaattcaggctggtaaatatgttgcctgcatgtttggcttaagaggtaatgctttttggagtaattacacttttatgtttgtaaaggagaatgcagtcatatttatagcggcagttatactttcaatgcctattgctaagaaagttaacaagcttgtttatgataaagtgccgggatataaaatattaaatggagtatatccaattgctgtattaggagtattctttgtatgcatttcctatttgataaagggaacttacaatccatttatatatcttaaattttaaaaagaggagtaatgaaatacaatgaaaacaaatatgaagaggagcaaggaaaagagtacaagtggaatttttggtaagaagtttataacatctatcatattcattattttcctcatttcattttcagcagagaatttaattgtttcctataaaccgttaattgaagcttataataatcagaaaaaagcttccgcttcggttaaagataccataagttccgttcaatatgctatggaagataatgtgtggatgaaatataaatttgtagatacatatagctatgttcaaagattgatgtttaaaaacgaggaatcaaattttgaagtcgttaaagataaagatggaattcttcattatacttattttgccgatcaagctaatcctgtatatgaattagcaagaagaactgaggcatttaaaaatggaattaaaggtaaaaatgtaaaattcgcatatattatgcctccagataagtacattgcaggaaaaacacaatttccaactggaattccttataattatgtaaatgaaactacggataaatttcttgatattcttaaagaaaaaaatatagatacaattgatcttcgcaaaaacttagataaaagtggtataccagcagataagcttttttatagaactgatcaccattggcaaataccaactgttttctgggaatttggacaacttgtaaatacgtttgataagaaatattctttaaatcttgatcctaataatttttacacagataagaataattataattttataacttataaagatgcttttgctggatcaatggcaagaaaaacgggaataacatattcgggagatgacgattttatacttgcatatcctaagttcaaaacctcgtataattactatagtaaaacaggaaaattaatttttaatatgaacggaagatttgaagaggtacttttaacaacatcacctttcagtagtaagtacaaggaatatgatacagaaggggataagtattctatgtaccttttaggtaatcagggaattacacatataactaataaaaataaccctaatggacctaaaatgttatttgttaaggactcattaacagtacctcttgcagcatttttatcgactgtgtgttccgatgtttatttagtggatcctagatattacagtggcagcattcctaagtttgtaaatagcgttaaggtaaattatgtatttatatcatattcaccacaggatttaagtactgatttctttaatttttatgagaaaaaataataatattaacaaagataaggataggtagttttatgattttattaacaaaaattactttgcttttgttttcaagtattttctttagttatatattatatatgaaatctcatagctttaaaaagatagaaccacgaaaatgcagcttaaatctcatgattataggaatggcatttattgttgtgggagaatttttgaattttatatcaagctttgtaaaatacagagttgatatatatgtttcgttttgttttattttaggagctattctctttgttatatttgctataatttttttaaactctgtagataatacccttaagtgtctctacggttgtgtatatgaggatgcaatgacaggagtttataatagaaacgggattaaaaagatttttaaagatactattaataaggaagataacttttttgttatgagttttgatcttgatgaaactaaaataattaatgataattttggtcatttagtcggcgatgagtatataataagtgcggctagagctataaaggaagtcttaggtgccaaaggggttgtaggacgaactggtggagatgaatttgctgccatatatatttctacagaccaagaggaacttaaaaaagttaaaactcatataaataaaagggcttcggaaatttttaatgggtcaaatataaatattagtatggggttttcaacctataaaaaagatggaaagaatatgaaggaactttttgatttagctgataaaaggatgtaccaggacaagaaaaacaaaagaaaagcagatcaaaggttttaaacaaagtgcctgaaattaattaattttaggcacttttaatagattttaagagatagtaaatatcaccgtaaaatagggagttttagctttaattaattatttgttgttatatagagagagtttcttgttaataatataatagataaatttttagtatatgaagctgaaaaagtagaaaataatctggtaagtggaggaattgttatgggaaatattattgttaatacagttaagagatgcaaagtaaaagttaatggcagtgcttttagtttactagctggagcttgcgatttagataaagaaaaccttggattttgtaaaccaaagccaagtccaccatggaaggcaaaattatacgagatggcataaactattatgataggtttaatggtatttaatgggtaaatggcttgtaaaagacatctaaatcttatacatatagttaataataaaataaaactgaagaaaatcttcagttttattttgtattatgttgaatttagtgtaaaatatatattaaagttaattaatggacttataggctaaaacatgtaagaacataaattaaatgtatttaatatatggttataatgagatttatgaaggtgaatttataaaaaaaggacagatgaataccatggttgaactaagaaagcttattgtatttttactttcatttacttttcttttatatttattatatgtaggaatcaatatttcaaaaaaactgaggataagaaggtcacctttctttttaatgatatctggtgttggtcttattactttaggtacttttttagatgctattgacaaatttatagatgtaggaataaaaaatgttatagccgcatgttttacttttggagcaatactgtttgttgtatttataatatttttatcaaacaactttgtgtgtacagtatctttattatatgaggatgcaaatatggacaaaatgacaggtgcttataataggaagggaattaatgaaatatttcaaagaagtattgctaagcagaatagcttttatcttatgttatttgatttagatgaaacaaagagactaaatgataaatatggacatgcagttggagataaatacataataggagcttcagcaattataaaggatactataggcaacaaaggatttgtaggcagaattggaggagatgagttcatagcgcttttaaagcttgaaaatgaagttgatgtagagaaaattaaaaagcttataaaagatcaattttgtgaaagctttaagcaatatggagccaacataagtataggatattcgaggtttaaagaagatggacaagagtttgaagagatttttcaaatagcagacaagaatatgtatgatgataaaaagagtaataaaaagaataaggcttgtttttaacgttaattcttatttattataatttattgttttatattaaactatataattaaataaacggatggatatataaagcgttggcaaaacttactgtgccaacgctttattgttatgataaattttttaataacaaatctatatcagtttttattcttttcaaggtttcaatatctgtatttgttgattttaaaacacaactaggaatttccaaagcatctttttttaattcctcgcctttttctgttatgttaactgaaagtaatcgttcatctagagaagatcttttccttacaattaaattaagcccttctagcctttttaaaagtggcgttagtgtaccagaatcaaggtatagtttatttccaagatcttttagtgttatagacttttcttcccacaatacaagcataactaaatactgtggatatgttaaacctagtttatttaaaaaaggtttatatacttttgttatagctcttgaagaggcatatatagaaaagcatagttgatattttagtttgagttgctcaccatcttgcataatagttcctcctccgtataggtttatagcaaattaagcattatatactattataaatgaaaaattcgattttgttaataaattttttaatatataattgtgcaaaatttaattgcataaaattaaaaatatgatataataaatttataatgagattttgggaggtacgattatgtcagtatatgattttaaagctaaagatataagtggagaggaaatatcccttagtaaatatgaaggaaaggttcttctaatagtaaatacagctagtaagtgtggatttacaccacagtataaagagttagaggatatatataagaagcttggaaatgaaaaatttgagatattaggatttccatgtaaccaatttgcaaatcaggagccaggaggcagtggtgatataaaaaacttttgtgaaataaactatggggttactttccctttatttgagaaaatagatgtaaaaggagaaaatgcccatccgctatttaagtatttggcttctcaagcaggtggtattttaggtaaagagataaagtggaattttacaaaatttttaatagataaaaagggtgatgttgtagatagattcgcaccagttactaaaccaagtaaaattaaggataaaatagttaaattaatggaggaatagaaatatgtcaatatatgattttaaggttaaggatataaatggagaagatataagcatggaagagtataggggaaaggctcttctaatagtaaacacagctagtaaatgtggatttacacctcaatatgaggatttggaagccttatataaaaaattcaagggtgaaaattttgaggttttaggatttccgtgtaaccaatttgaaaatcaggagcctggaactaataatgatataaagaagttttgtcaaataaactacggagttacctttaaaatattcgataaggtagatgtaaacggagaaaatgaagctccattatataggtatctaaaggaacaagctccatttaaggaacttgatgaaagtacacctacagctaagataatagctgcatttttaagagaaaagcttcctgaaacacttattggcgattctataaagtggaattttacaaagtttttaattgataaaaatggtagagtagttaatagatttgaatctggggtagaaccaatggagatagaaagttatattaaggctcttatataaaacacaatgattttagcaaaaatatatggagataaaaatatgtactatggttattttatagtacatatttttgtttatcaaattgtattgtttcgataaataaccttgaaaatggctataaagttaaatttgttgacggtaaaagcataataatataaaataccattaagacgacaaacgacacactgtatacggagggttaaaattattatgctattagaaagtaacaccaaaaacgaagaaattaaggacaatttaaagtacttagttcttctttcgaaacagtacccaacaattaacgaagcagctacggaaataatcaatctacaggctattttaaacctacctaaaggaacggaacactttttatcagatgttcatggggaatatgaacaattcatacatgtacttaagaacgcctctggagtaataaaaagaaaaatagacgatattttcggaaatagacttatgcagagtgaaaagaaaagtcttgctacgttgatttattatccggagcagaagctggatataatattaaagcaggaaaaaaatattgatgactggtataaaataacactgtataggcttatagaggtttgcaggaatgtctcctcaaagtatactcgttctaaagtaagaaaagctcttcctaaagaattttcgtatataattgaggagcttttgcatgaacaacccaagggagtagataagcaggaatattatgacgagataataaagactattataagcatagatagggctaaggagtttataactgcaatatcaaagcttatacagaggcttgtagtagatagacttcacataataggtgatatctttgatagaggtccaagggcggatattataatggataagcttgaagagtatcatgcggtagatattcaatggggaaatcatgatattttatggatgggagctgcatccggttcttcagtatgcatggcaaatgtaataagaatttctgcaagatatgcaaatctgtcaactatagaagatggttacggaattaatttgttgccattagccacttttgctatggacttttacggaaacgataagtgcaagaattttgaacctaagatagaatctgataaaagttatacagtcaaggaaattgaacttataggtaaaatgcataaggctattgcgataatacagtttaagcttgaaggagaagctataaaaagacatcctgagtttaagatggaacataggatgcttctaaacaaaatcaactttgaagacagtaccatagaattggatggtaaaaagtataaattaaatgatacaagctttccaactatagataaaaatgatccatataaacttatagatgaggagagggaggtagttgaaaaattaagatcttcatttgtaaatagtgagaaactaaacaggcatgtaaggtttttattttctcatggaaatctgtacctaaaatttaactctaatttgttataccatggctgtatacctttaaatgaggacggaacctttaaagaggtgttaataggaagtcataagtataagggaaaggcacttttagataaacttgatgttttagctagaaaaagctttttttatgaagaaaattctaaaaacagtaagtatgagaatgatatgatatggtatctttggtcaggccctttttcgccactttttggtaaagaaaaaatgacaacatttgaaagatattttattgacgataagaagacacattatgaaaagaaagacccatattatcattacagagatgatgaagatatatgtatcaatattttaagggaatttggacttgattctgagcaagctcatattataaatgggcatgttcctgtagaaagtaaaaatggagaaaatccaataaaggcaaatgggaaattaatagttattgatggagggttttcaaaggcatatcaaagtaaaactggaatcgctggatataccttaatatataactcttttggacttcaacttgtatcacatgaactgtttgaaacaactgaaaaagcaataaaagaagaaacagatataatatcttctactgttatatttgaaaaatcggtaagaagaaaaagagtaggagatactgatatagggaaagatttgaaaaagcagctctatgagttgaacctattgcttttagcttataagaaggggcttattaaggaatttgtaaaaagttaagattatgtacaaaaaaagagagaattttatgtcctctctttttagttataacatataacgtggatttgccttattttgtcttgacataaaatttaaacttatttaaaattttataagaagataaaaacacagtttggttggtagtccaaacgcatttatattcatataaaataaatgtcagtaacctgccctcgcgggttgtccactcttcttaaaaacttaaataagcgagggaataaaatgaatatatctttaacagtattttttgaagaaccattttgggtaggaatatttgaaagaacaaataatggagagtatgaagtttccagaattgtttttggtgcggagcctaaggattatgaagtgtataaatttgtgctaaataatttcagaagattacactttactaaacctctaaaagatgaaaaggttactaaaagaagaataaatcctaagagacttcaaagaaaaattaaaaaggaagtagtaattggaattggtacaaaggcacaaaatgcaataaagttggatttagaagcaagaaaagaagaaagaagaatttttattaagtctaaaaagaaggaatatgaagaaaataaattcaggttaaaacaggaaaagaagaaaaagaaaaagagaggtcattagaacatttgtatgatctatataagtacaagcataattctttgtaggtttattacattgtggtattaaggttattgtagtaatatagaacaaatgtcattgttagttaaggagatataacatgaaattattaagtttggtaccagaaatatatgagttcaatgatttttctaagttcgcagaagaatttaaattgggtaaaggtgattttgttttaactgatgagtccctgtataagtcatctatagaaaatcttaatcttaagagtaaatttgtatttcgtaaaagctatggcataggagaaccatcagatgatatgatagatgcaatagtaagtgatatggaaaaagaagatataaatagaatcataggaattggtggaggcactattttagatatatgtaagcttttggctttaaagcctactaaaaagtcaatagatttgtttgaaaaaaaggtgccaatagttaaagaaaaggaattgattttgattccaaccacatgtggtaccggaagtgaagttacaaatgtatcaatagctgaaataaaatcaaagcatacgaagatgggacttgcctgtgatgagctttatgctgattatgcagtatttattcctgaatttgttaaaacattaccatttaagttttttgtaacaagttcaattgatgcacttatacatgctgtagaatcctatgtttcacctaaagccaatcattttactaaaatgtttagtgttgaagctataaaattgataataaatggttataaggaagtaattaagaacggcgaagaatataaaaataatattattaatgattttataattggtagtaattatgcaggaatagcatttggaaatgctggagttggagcggtacatgcgctatcttatcctcttggtggagtatatcatattcctcatggagaagctaactatcaattttttatagaggtttttagtacatataatggattaaagcctgatggaagcataaaagctttaaataaaattttacaggatgcattggagtgtgattccacttcggtttatgatagtttgtctaatcttttagataagcttctttcaagaaaaccacttaaggattatgggatgaatgaagaggaaatcgacaaatttacagatagcgttatagaaggacaacaaagacttcttttaaacaactatgtccctttatcaagagatgaaattaagggcatatataaaagactattttaatattataggtataatcatcttgctgctaaggttttggcagtgagatgattatttttttaaagctttatatttgctttaaatgtattaaaatttttattttcaaatatactaatattcaatgcaggaatctactctcgtctttgtatgtaaattcatattgtcctattttcaatttataaaactctttttatatatcagtactataaataaatttaatatgaataattaacaatcaaaaggaaaacataagggagaacaaacaatgcgtttatggcatcaatctttgattacaaaattaccaaggcaacagcttttaggtcagcatagagaatgttgtgcacttagaggaaatgcgtgggggaaaaaacatagtgtagttgattatgttttttgtcatcctatggaatatcttgttgcttatcatcttcttgtaatggaggagatggcaacaagaaattataatgtgtcagatcagtggatggactataattacagaggcaagaactgtgaaaaggcgaatttgaactttgaattaatagaagaaattaaggcatcaaaaaacatttataaagagcatgatgatgaatatcttaatgaatgtttagcaaatttaagaaataagggaattgaacttttttaggaggtctttatatgaattttccaaatacttttccaaagcagcatcaaaatcatcaaccaggttacgagtatgaaatgaatccagctcctatatattatgatgaaaagtataataaatcaaggggactcttaaaaggaaagaccgcaattatcacaggaggagacagtggaataggaagagcggtttctgtggcatatgcacatgaaggtgcagatgttgttataatatactatgatgagcaccaagatgctgacgagacgaaaaaaataatagatggcttaggaagaaaatgtacacttatgcctggagatataggagatactaatttttgtaactatgcaatagaaaacacaataagagcatatgataagatagatatattagtaaacaatgctgcaatgcagtatcctcaaaacagcatagctgatatatcaaatgaacaatttgatagaaccttcaaaacaaatgtatatggaactttttatatgacaagagcagcaataagtaaaatgaaggctggttcaagcataataaatacaacatctgttgtggcttttaagggaaatgaaacacttattgattactccatgacaaagggagcaatcttagcatttacaaaatccttatcaacttctttagttaaatcaggtataagagtaaatgctgtagcgccaggaccaatttggactccacttatttcagcatcttttgatgaaaataaggtttcggaatttggctcaaatgtacctcttgaaagaccaggtcagccagtagaatgtgcaggtgcatatgtatttttagcatcagaaatgtcttcgtatataactggtcaaacaatccatgtaaatggtggagaaatagtaatgtaggctgaaaaatcatgcacagaagttttgtgcatgatttttttctatgaaaattaatttatgacttttaaatatttatttattgttataaaattattgttataataaaatgaataaattactttaaaggattgataaaatgatgaaggtaaattatcagaaaaagcttgacgaaacaattgaagaaattttaaaagagaataaagtgccatcgcttcttcttcacagttgttgtgctccatgcagtacttatgtagttgaatacttatccaattactttaatataacagttttttattataaccctaatatatatcctgaagatgagtatagaagaagggttcaagaagaaaaggattttatttctgaatttaatactaaatataaggttaactttattgagggagattatgaaactaagagattttatgaatgcatacaagggtttgagaaggaaagagaaggcggagaaagatgtttcaaatgctatgagttaagacttctagaagcagccaaactagctaaaaatgaaaactatgattatttcacaactactttatccataagtccatataagaatgctcagaaattaaacgaaataggagagagactttcaaaagaatataaggttaaatatctatattctgattttaagaagaaaaatggatataaacgctccattgaactttctaatatatataaattatatagacaagattattgtggatgtatattctctaaaaatgaaagaaatgaagaaaaataagcaccgaaaatggtgcttattttttttcgaaattcacaattaattttatcatacttgatatcaattttattttttctggagggcatgttttgagcatgtcggttatttcatttttttgataattctcagaatcggtagtcgaccctgttagaatatatgatggtgtgatgtttagaaatttgcagattttcattaatgtttctaagttgatttttgtttttccacattcaattttacttacataaacagtggaaacgtccaaatattcggctaaattttcttgagtataattttttgactttctagaatttcttattctatctcctattatggaataatctatgtacataattatcacccttataaatatatcatttataaaataattttaatataaactctagagttaaaataaactcataagtttacaaaagttagagaatattgtagaattatattggtataaaatcaaaggaggaatttatgtgagtttcattaaaaatttaaaggtgagaacaaagttagcagcatgcttctttgtagttacactatttataataataataggtagtatttcaacttattcattagaaatgctttcccaaaattcttataatattcataatagtgcacaggtggtggcaaatcaagtaaagataattattatttttactgtagtgggagcaattttaggtgcaatctttgcaataattatatcaatagatatagattctcagttaaaaggagtaatgaattttgcacgggcaatttcaaatttcgacttatctaaaaattacactgtagatagaactgatgagtttggagaggtaagaggggcactcataaaatcacaagaaaatcttaaaggtatagtaaaggatataattaaggagtctgaaattgttagttctgctagtgaggagcttgcagcaacggtagaagaaattacatctaagtcagaaactatagatgaagctacaaatgaaatagtttcaagtgtgaatgatactagtgcagcaagtgaggaaataacagcatcagtacaagaagttaattctagtataaacgaattatcaaataaatcaatcgaaggcagtgacaatgctgataaatcgaaacaaaaggcagagcaaattagaaaagaaagtaaagaagctatagaaaaagcgaatttattatataaagaaaaagagaaggagcttttagaggttatagagaaggggaaggttgttaataatataaaattaatggcagatactatttctagtattgcagagcagactaatcttttggcattaaatgcatccatagaagctgcaagagcaggagaaatgggtaaagggtttgctgtggttgctgatgaaattagagagctttcagagaaatcttcacagtctgtagaaaatataaagtctatgatatctaaagtaaatgatgcttttagagctgcatcatcaacaagcaaggatatgcttcagtttatagaaaagaatgtatctccccaacttgaaaattttggaaaaatggcagacgaatattataatgattctaaatttgtaagtggtatgtctgaggaagtagcgtctatgtcagaagaaatatcagctacagttggacaagttagtgatgctacgctgcatatggctgaaggagcggaaataacagctgaacatacaggtaatataaagagtgctataagtgaaacaaccaaggcaattgagcaggtagcagaagctgcacaaagtcaagctcaaagtgcagaaaagctaactgaaataatacaaaaattcaatatatgatctgctatgaaagtcatatataactattgattacatttttatttccttttggtacacaatgtatgttatagagacatattcttacgatatagctattataaatttgttgtataggaggaaaagatatgatagctgctattagttttagtcaatcatttagtcattctagacacgatggaaaaactaaaacaaatattaaagagaatttgtgtgataatataaagatttatgggcaaatggataaggaaattcaagagttacaaaatcaaaaagaaaaagttcagcaaaatagagaaaaattattcaaaaaagctttagaaagaggagaaagtcagcaggatatacaagtggagcttcagggtgtggataagcagattgaagaaattgataaacaaatatctgaagtacagatgcaaaaacaaaatgagtcacttgaaaaaaatagtgaaagtaaagaaaactctaaagttaatgacaatgatagtaaggatgatgactcctcaaaagagttaatacaagatggttgtagtttagataaagccaaaacaatattttcgaggaaaataaaaaatacgggagaagccaatacactaaaatacgaggtagaggaagataaagccaggagagtaaatactaaatataaagaacaaagaatagatactttggaatctgccggtcaaaagttagacaaagatctaaaaaatgaattagataaaataaagaaaaataagagcaatagcagggcttataggaaacatgctttaaaaagttataagaaaaatattaaagaggattataataagcagttaatatgtaagtcagcgtaattgacataaaaggtctgtaagaagtacaggccttttgtgatataataatttaaagaggtgactttattttatgcttaaaatagctgtttgtgatgataacgatattgagagggaggaaatagtacatataattaataaacatttaaaatataatcaaaaggattttacaatattgaaatttgagcaagctgagcaagttctaaagtctataataaagtttgatttgtattttttagatataaaaatggaaaaaatgaacggtatagaattagccaaaaatataagaaatatatctaaggatgctgttataatatttgtaacctcgtacagagattatgtttttgatgcctttgatgtaagggcctttaattatattataaagccaatagaccaagaaagaataaaaaaaatattgaatgaagcattagctgaatttgaaaagcaggacaggtttattataaccaaaaccataagtaagtccacaaaggtttttttaagagatataacctatatagaggcagaaaagagaaaaataaagatacatactacatatgatgtaattgagtattataataagatatctcaacttgaagaggagcttagggagtataatttctttagatgtcacaaaagttacatagtaaatttgggatatgtaaaaagttatgataatacatctattacattagaaaataacgataaaatttatatatcaaagtataggttgaatgattttttaaagacttttatgtactatctaaaaggagaagcataaagattatgaatgagattcaaatatacataaattcttttataactaatgcacttcttatagcgattaaatattacttttatagagagtttttagggttttctaaaaaaagaaaaatatatttattttttgtattagagattattgtttcgataatttctaatacagttagtgataaattaggttttaaatctatacttataattattttaattgaaattataattatttttttaacatgcagaggcaaatctttggttaaaatttattcagttatgctaatagaaaatatactgattttgataagtcttacgtttttaatagtagattttaaaatagatcatgttatgagtagagcttttataaataaagattatttaaaaattttcaatctaatactaataaattttagggacattttaaatgaaatatttttatttatgttgttaaaatgtatatgctcaatacttaagataaaaaatagcgaattaaatatatacaagcaattgtatttagtaatgccgtgtatttcgatttatggaataagcttcttgttttacaatgtacaattagtagatacgggaaaaggtgaatattatttaccagagatcttctcaagcatttattgtatgcttccttttattggattgtttttaatcctttcaatttttattgcagcgtatacctttcaaaaaatgttagatggggaagaggagagagaaaaaagtattcttatgcagcagcagcttaatttacaatttgaacacaataaaaatattcaaaatctttataaaaatacaagaggggtaatgcatgacattaataaacacataaactgcttaagaaatctagcttattctgataatattgatgtgttaaaaaattatctaaataatatctctgaaacaataaaaaaactagacttcattataaaaactggtaatgcagttgcagatgcggttataaatgaaaaatatactattgctaaaaatgaagggatagagttatattgtgattttataatgccagaaaaggcaggtatagaacctatcgatttgagtattattttaaataattcacttgataatgctattgaggcttgcagaaaaataaaaaatttagaattacataaaagaatatctattaaatctattgttaagaattcttttttaataatagaaatatcaaacagttgtgaagagggaattaaatactgcaataataatattataagtactaaaaaaagtgagaccaatcacggcattggtatttctaatattaaggaagctgtaaaaaagtatagtggaacttttgatataaaggaagaaaaaaacatggttatacttaacataatggttagtatataagaaaaaggttttataggataattcctataaaaccttttctaataatttcttaagaccagcttcaaagtcttcattagatgagttatctacaacaaaaagtccttctaaatcaggagtagtatagttttgtccttttacgtactcatcccagttatttaatttccatgtgtctctatcggagtttctttttatcatccttttatgacacacatctatatcacagcttacccaaacaggaattaattcagcattgtatttttttaatttgttttttagattattcatgtagcccttgtctctaaactctttagaaaaaggtgcattaacaattacacaattgttgtaattaagactttcaaaagctaagtcaaatgtaactatgtattcagcatctctaacgtattccttgaagaaatcagaatctctattatatggctgatttgcagccttaaaaaccatttttgatagaggaattacagtatctttatcaagatatactggattattaagtctctttgctaattctccagaaacataagttttaccacaagctggtggagaacctactaatattaaatattttttcataaaaaaacactcccttttgcatgtagaaattttaacataaacacgattttattataccataaattttattgttgtgattaaaaattattgaaatataataaaaaataataaaaaataataaatttttaggtgttgactttacaatgaacattgccaagggtatacttttattaattgttatattgatattatgtagggatatttaggtatttatactgaaacttaaaaaattgttttgtgaaattagaaataaaaaactatcatatgggaattacataaatatgattttttcattttggtaaaactaatttaaatataaaaattgatataagcttggaattttggaaggtgggtgttaataaatatgttagatatttgtcttttagggtgtggaggaagtcttcccacttcagatagaaatttaacgtctcttttaatatcgtacaatggaagaaaaatattaatagattgtggagagggaactcaggtgtccatgaaagaaattgcatggggttttaaagatatagatgtaatatgttttactcattatcatgcagatcatgttatgggactcacaggacttctacttactatagcaaactcaggaagaatagatcctcttacaataataggacctgagggtttaagggaggttgtaaaaggacttacagtggttgctccattttttccttatgaaatagagttaatagaattagattctaaatgcagtgacaactttttagataaggtttttaaaattgaagacgtggagatttttgctcttccggtggatcacagtatagagtgtctttcttattctgtaagggtaaatagaaaaagaaaattcgatgtaaataaggcaaaggcaaatgaagttccgttaaaaatatggaatgagcttcagaggggaaaagaaattacatatgaaaataaattatatgttcctgatatggttcttggagaaagtaggaaaggtataaaaataacctattgtacagacacaagaccggttgatagtttacataagtttgcatataaatctgatttgtttgtatgtgaaggcatgtatggagaagaggagaaaaaggagaaggcagtagataaaaaacatatgatattttcagaggcagcaggaattgctaaagcggcagaagttaaagaattgtggctcactcattttagtcctgcattaagtgagcctgaaaagtatttggaaaatgctaaagagatttttgaaaatacacatataggttcggatagaaaaattaagataattaactttgaaaataattagtcctacgtagagtagacattagattctttttcacttttttcataagatggtactttttttaggatgatgcctccaattaaaaatagaacaagtatgctaagcacgcctttgttggagtttccagtaacttgagatactatcccaaccataaaaggtcctagaattgctgaaaacttaccgaatatgttatagaagccaaaaaactcatttgctttatttttaggtaccagctttcccaagtaggatctgcttaatgcttgtattccgccttgggaagttcctacaagtattgctaatatccagaagtctaaggtgcttcttaaaaagtaagagtatacacaaattattgaatatattactatccctacataaagcattgttttgccttgaaacttttttgccagcattccaaaaataatggaaaatggaaaagctataaattgcattactaaaagaattactaacattgtagtagaattaattccaagatctgagccgtacgaagtagccatagtaattattgtatttacaccatcaatataaaaaaagtaggataataaaaatatgaataattgtttatgcttttttatatcttttaaagttgattttaaccttaagaaactttttcttgcaggatttttttctatattgattgaatatgtctgttttacgttttttatcataggtattgtgaatattgcccaccataaagctgttattgcaaaggatattttacaagcagtaaaaaaggatattggaattatcttaagttgagctaaggctattattaatatacacaatataaaaggtatgttgctacctatgtaacccattccaaagcctaaagaagacactctatccatattgtcattgtcactgacatctactaaaaaggcatcataaaaaatgcagcttccagagaaacctatggaagtcagaatataaaataaaattattaaaagccaataattagttggaactacagagagaagaagggtaaagcttgttcctaaaataaagaaaacattgaaaagcttcattttatagcctttataatctgccatagtccctaatattggagataaaatagctattaaaagagttgctattgaattggaatatccccagtacgctgtagaagaagccgcacttacaccactttttaaagctattgatttaaaatataaaggaagaatagtagctgttatagctgtactataagcagaatttgcccagtcgtacataatccagcttttttcacctttacttaaatttctcatataatcctccgttcattttttgaattttgtcatttatatgtaattacacactaaatatattttagaggatgaatttatggatgtaaatagaattttttataaaattaggtgaggattaaaagtaaggatcataaatgacaatatgtaagataaatgattatgcctcaaaaatatttattatttaatatataaatgcgttatttaagatcttataagtataaatatttgacaagttttaggttaattgataaaattaaattaatttcataggtgatgaggttcgcccgtaaatatcctgtttggattgatgacttctgcataattaatatgtaggggttttttgctttttattaattgttttaggagggagttatgaaaaaatatattctcattggattaggtggagcaattggagctattttaaggtgttttataaggaacacaaaaattcctgtatataaaggtgaatttccaattagtacacttatgataaatttaagtggagcatttattttagcagtaattttgataacagcaaatgaaatatggagctttaatgaagaaataagactaggtattgcaactggttttgtaggagcatatactactttttcgactatgtgcaaagaaacaattattcttatgaataaaaatttgtattttttagctttttgttatgttacagtatcggtagtgtttggactactttttgcatactttggtgcattgtcagcaaggaaaattttatctaggttacttaaggttagaaaagaagacgaaaaggcatcttagggaggaaataaggatggattattttttaataggtattggtggagcttgtgggagtattgtaagatataaaattggagatataatttcaaaaagaactaaatcaaaattcccatggggtacattcataataaatataacaggagcttttttactcggaattataactaagtcaggtgcaggtaaaaatctttcaatgattttagctgacggctttttaggagcatatactactttctctacatttatgtatgaaggatttaatttgtttgaaaataagaagaaattaaatgccttaatatatattttatcatccataataattggaatcttaggtttttacatgggtgaatttataagtcaattataggttgtttattttttcagttaatatagatttaatttttttttcgtgcaaagtcatataatgatccttttttataacaatagaaatataaaaaataatgggctctaaaagtggtattgcttttattgtatccatgttttttacagccatatttatcattattcctataccaagtccagaagctattaatgactttgcagtttgtatttcattagtatagtatacactatctggtgaaatattattttttgaacaaatgtcattgaatactttattgtgaagataggaatcgccaagtactataaatttttctttagataggcttttgatatttaggttacttgcagaagataggggatgatctttacttacgcataacataaaggcatcttttttcaatattattgagtttacagctgaattttctataggactaagagaacctagaagggccatatcaacttttcctgatattattaagtttttcattgcagctgaacctgtttctacaagctgtatttcctcagctaaattattttttataagacttttcataaaaggtggaaaaaagtaggctccgattattgggggaacgccaagcttaatcttgtttctagttaattttgaaatttcaaattttactgtctctatttcattaaggatatttgaagaatgtttctcaagaatttttccagattcggttagtgaaaatttatttttattatgatcacgtataattagttccgtatccaattccttttctaatctgtgcagcgacatggttatagaaggttgagaaacataaagaagttttgcggtttcggtaaagcttttatactgacaaaggcagttaaagtattctaaatctcttaagttcatggtacatccctcctaaaataggatacaataaatataaaatataaacaacacataaatataaaaggtgatcttaaaaatcaccttttatatggaaaaaccacaaaacttaattgatagaaagtttatctatagtatggttcccaaatttcattttcaacagcattttcagcatcaactataggtgcacgatttaaattttctttaacggcttctttaaccacagcagtagctacaagctttgaggcttctctaagctttgatattacaggaagcataggtgcaccttttacggaaaggtctattaaagaagaaacaccgtgagcagcagcagcaagcattccatcagaaacagtcttagacttagaaacaactattccaagacctaaaccaggataaagaagggcattgttagcctgacctattgtataggttacacccttgtattctacaggagaagaaggacttccagtaaccacaagagcatttccatcggaccattttattatatcctcagcttttgcttcagcaagctttgttggattagaaattggcattatagctggtctttcagtggattttgccatgtttttaacaacagcttcagtaaaggcaccgtgaactccggaggttccaattagtacagtaggtttaacttcagcaactatctctgcaaggtcttttagaggttttttaaattcacctttttttctagaatattttttctgtccttcagttaaatcctgcatatcctcagtgataaggccctgacgatctacaatataaaaatcttttaaagcctcatcaagagtaagaccgcttctaattttttctaaaagtatttgatcagatacaccaataccagcagtaccaccgccaaatacaagtattttgtgatttttaataggagtattagttacttttgctacagagtttagagcagctaccatcataacgcctgtaccctgaatatcatcattaaaggtgcatatgttatttctgtatttttcaagtatagtgcttgcattgccgcgtccaaagtcttcccagtgaagaagaacatcagggaaaagtgaggtgcaggtttttacgaattcatcaatgaaggagtagtacttttcaccagtaactcttttgtgtttattgccaacataaaaaggatcattgagaagagcttcattattagtacctgcatcaataacaataggaaggacatttctagggttaagaccggcagccacagtgtatacagcaagtttaccaatggaaatatccacaccttgaacaccccaatcacctatgccaagaacaccttcaccatcagtaacaacaataagcttaatatcgtctaaatcattggaaacagcttctatagatttttttatattttcgggatggtttatagataagaagacagcatccttaggagtatcgtaattcttagagtaattaattacggcatctccaatagtaggggtataaactataggaagaagttcaacgatatgtttttttaccacataatagaaaagaattctatttgtatcgtatatgttcattaaataaaaatgcttatctaaagcatcatcaattgatttaagcttttcataaaccaccttttcttgctcttcaagagtcattacagcacaaggaagaagaccggttaaatcgtattttttcctttcttcaagagtaaaagcagtacctttattgaggaagggatttcttagtaattctaaaccttttaaattattcattaattatgcatctccttttaatttaatatattccaataactttccaccatatggagcctatacctagccaaataataaaatatactattccaagaataaagtttaagctccaccatttattttggttaacatagcccgaaccaaatagaatcggtgctgggccgctgctgtaatgtgtagttgaagcaagtagatttccgaaaaaacctaaacttaaagctgcaagaaggggagggacacctcctgcaatagcaatagccaaaaaggcggaatacatggaacttacatgggctgtagcactagcaaatatatagtgaatgtaaaaatagcaaacaagaagaataaggagtataatcggccaactaaagccgtgtacactattttttactagagtgctgaaccatttgattaagccaagtttattaagctgatttgccatcataactaaaactgagaaccatattaaagtatcccaggctcctttttcacctttaacatcatcccaggtaataaccttaaaaattaaaagcagtgaaagtcctataaaagcagttaaagtagcgtctatttttgttaagcttccagtgatccataaaaagagtattataacaaaaactatagacataagtttttcgtcttttttcataggacccattttttctaattcctttttagcgagttcaggagcattgggagtattttttatttcaggtggataaattttataaataataagtggaattaaaacgagggatattatgcctggaactaatgctgcaaggaaccacccaaaccaagtaatattaacattaagagttttagcaagggttttagcgagagggtttgcggccatagaagttaaaaacattgcggcagttataatatcaccatgaaattcagagaatattaaaaaagaacctatctttctttcagtgttatcctctggttttgaaccaaaagcttccgagagagattttattattggatagattattccaccggctcttgcagtattgcttggtgttgcaggtgctattacaagatcacaaaatataattgaatagcaaagtcccaaggtttttttgccaaataattttataaagtgatatgcaatccttgagcctagacctgttttaataaatcctcgtgaaatgaaaaatgctattactatgagccaaatacttccttcactaaagcctagcagtcctgtatttacattaatagtgttagtaattattgcaagggttaaacctattatggaaacagctcctataggaagtggttttagtatacaggccaatattgtagctataaaaattgctagcatatgccaagctaaaggctgtatactctttgagtgtggtataaaccatataaaaactccaaataagatacatattagaagtttaagataaatgttataatgagattttcttatttcactggtattcatatggaaggcttcctttcttttatttttcatgtttattataaaagagaagaagtaaaattagaaatatagtttatttatcaagttataaatattatttataacttgataaatatattttgaaatttggaaaagtattattttgataggtcttttttaagatatatatatggattagaaggtttttgaatagaatgaacgctttttacattaattactggaattatattttgacttgtatcctctttgtcgaagtttttcatagagctaatagtaccttttatggtaacccaatcattttctttcaagtccgtaaaagtatcagtataacaagtaagtcctataacctccgcatcagcagcacagcatactataagcattctagcaattacaaaatgattttttggaaaagaattgtctttgtaaataaaaccggaaagttctatatttttacctttgtacttaattatattatttgttatttcagttgtcatatctgaaaagttttcatcgtttaattttatataatcggatttgcttttagaagcgcctgaagtagattctatagaagatagttctgttattccttttttttcagcaatatttgaatttaatccctgtggatttataatgtaggctagtataagtggaacgaagaaaatagatgaagctgcttttaatgaagagtgattttttctggtaaaaagctttttaagttggaaaataattaatataaaaaaaatcacaaaagcaaagattatataagctgtcattttagggtgtataaataggtaaagttttttgcttgatataagatagtacatgtaatatgtaaaacctaaaagtattataaaccatttaaattcgttcttcatttcaatctccttttataatggaattttaacaaaattaaaggctagtcctatgagaaaacatacaacaattattatggacactaatttgaatacaaattttaaattaaaggtttcacaaagcataagagtattttttatatctatcattggtccaaaaattaaaaatgcaactatagaaccattggtgaattgatttacaaaagtacgtgctataaaagcatcagtttcagaacaaacgcatagtacgtatgccaaaatcatcataactataattgatgatatgttaccatggcctattgatagtatatattttcttggaataaaggtttgcataagtgctgaaagaaatgcacccattattacaaatctccccacatcttgaagttctaagcttacatgatctaatacatgtactaaagtaagagctgaaaatttttcttcttcgtgatgaacgtgaccacaactgcacttatgatgttcatgattatgattactggtaacaataggattgttcttaggcatgtacactctctcgttaaataaaatttcatgtagtttagcttgtttagttttacttttgtctaatttatttattataaaaccgattagtactgcacttatccatccagcaacagcacgtataagtggtgcatgtggattgcttaaaaatgcgtaataagttgaggtaagaaccactggatttataattggtacggatagcataaaggttatgcctattggtaggggaagtcccttttttagtaatcttctaactatgggtactatagcacaatcgcatacaggaaatataagacctatagtagcagctgataaaattccaagaacaatatttttaggtattattctagagagagtttcttctgatataaatacttgaattagagaagataaaaatacacctataataataaaaggtaatgcttctaaaataatgcttataaagatagtaacaaaactttgcaaaaaagagttttgaagtataaaagaaaaagtttttctgagtattttaatatttgtggtaagcataaatattatgggtaaaattatgcataaaagaaggggaaggaaaaattcattatgacgactattttccaatttatatcaccacctaatatatttaaataaaaaagtaaaatcaatactgattttactttttcaatacaattatagatattctattttatatcgggttatgaaaaaaattattttaagctgttataaatttcatctaaatcagtttttattgaagaaagatagtcctttccatcttcagcactttctacagtatatattttttgtgtttttgcatcgacctcttcggctagagtacgtgatactttaggacttaccatatcttcataaaatacagttcttacattattatttttgcagtattccgttaaatctgctaattgtttagtactaggttcaccttcagcaaaaacattttctacactcttttgttttaggttatagtctctgcatagataagcaaaggcagcatgtcctgttacgaaattcttgcttttaacgattttaaatttttctacatattcttgatttaatgaatctatttttttgcagaatttatcataattatcgtaataaaattttttgttagctgggtctgccttggcaagggcatctcttatgtttttagattctattcttgcattatttaaactgagccaagaatgaggatcgtattttccatgttcggatatttctttggaatctgaattttttatggcatttattccttttgaggcctcaagggtaattaactccttattgtcaactgactttaaagttttatctacccaggtctccattccaagtccgctgtatataaaaaccttagaatcatataaagttttaatatcctttgctttaggatcaaaatcatggggttctgtaccatttggtattatagttactatatcaattttatctttacctatggcatatgtaagttctttcattgcattaaaggatacagcaaccttcatttttccgttactggattgattgttgctgcacgaggcgagtactactaagccaattaaaacagcaattaaagaaaagaatttttttatcatattatttaccactcctaaaatgtacttgcaaataatttgcattaacaaaattaataatatgctcatatgtagaatttgtcaaccattcattagagaatagtatttattaaaataagcccacttgaattaacagttagggcttattttttattttgagtaaaattctattacagcaacctcatttacctttataggtatttcatctatattaggcagtcttaataattttccagagaattcgtcgggatttttttctatatagggtacattaaaagttgaaagattcataaagttgtttgagaacatttcattttgtctgtgtttttcttttaatgatactacatctccaacttgcacttcataagaaggaatgtcgagtttttttccattaactaatataagaccatgacttaccatttgccttgcttgacgtatagaattagcaaaacctatcctgtaaactacattatctaatctacattctaaaatttttaataaagagcttccgcttgcttctttatttttcatcgcagctttaacatatctgctaaattgtttttcgagaacaccgtagtatgccttcaatttttgtttttctattaaatgcattccataatcagaaatcttcttctttcttgtgtttgtagtttcaaatcttttcatagccttaggatgaccatatatatttactcctagacgcctggataatttgaatcttggttcacgcatagttgccattgtgtaatagcctccttaaattttaaaaaataatattaaatatagtatgagcttaaagttattttttatttatagttacttaacttttaagatttttaagtgaaattggtattgctcgtatgaaaaacatactaatgaaacaatatgcttaatttgtttctttataaaatatagaaaaattacttatttaatggaattaagttaaatttattatggtataatgtttacgtatgttgaaaaatgtaatgtaacgttttactttttcttctaagtatatttggaggtaatttcatggttgtagaacctataagagacaaaaagaaaattaaacaaatttattattatttaaatggtaaggatattaaatatggagtgctatttaaatttggattaaatacagggctcagaataagtgatatactgcctgtgaaggttaaggatatttttaacccaaactacgaatataaatactattttacattaaaagaaaagaagactggtaaggttaaaaagattaagttaaatccggcaataaaaaaaactttactagggtttgtaaaaaagaagcagatgagcatggactcgtatttattttacagtagaaaaggaggacatttagaaagggtacaagcctacaggatattaaaggaagcggcaattatttgtggggttgagaactttggaacgcacagtttacgtaagacctggggatattggacgtataaagcttcaaaatataatataggcttaattatggatacgtttaatcacagttctcaagcaattacacttaggtatataggaataaaccaagaacaaaaggacaatctttattctttggtacagttttaaagtgaaaacacttatacatgtgctaaaattatttaatagcgtatgtataagtgtttttttaattatttatagtatggttcccaaatttcattttcaacagcattttcagcatcaactataggtgcacgatttaaattttctttaacggcttctttaaccacagcagtagctacaagctttgaggcttctctaagctttgatattacaggaagcataggtgcaccttttacggaaaggtctattaaagaagaaacaccgtgagcagcagcagcaagcattccatcagaaacagtcttagacttagaaacaactattccaagacctaaaccaggataaagaagggcattgttagcctgacctattgtataggttacacccttgtattctacaggagaagaaggacttccagtaaccacaagagcatttccatcggaccattttattatatcctcagcttttgcttcagcaagctttgttggattagaaattggcattatagctggtctttcagtggattttgccatgtttttaacaacagcttcagtaaaggcaccgtgaactccggaggttccaattagtacagtaggtttaacttcagcaactatctctgcaaggtcttttagaggttttttaaattcacctttttttctagaatattttttctgtccttcagttaaatcctgcatatcctcagtgataaggccctgacgatctacaatataaaaatcttttaaagcctcatcaagagtaagaccgcttctaattttttctaaaagtatttgatcagatacaccaataccagcagtaccaccgccaaatacaagtattttgtgatttttaataggagtattagttacttttgctacagagtttagagcagctaccatcataacgcctgtaccctgaatatcatcattaaaggtgcatatgttatttctgtatttttcaagtatagtgcttgcattgccgcgtccaaagtcttcccagtgaagaagaacatcagggaaaagtgaggtgcaggtttttacgaattcatcaatgaaggagtagtacttttcaccagtaactcttttgtgtttattgccaacataaaaaggatcattgagaagagcttcattattagtacctgcatcaataacaataggaaggacatttctagggttaagaccggcagccacagtgtatacagcaagtttaccaatggaaatatccacaccttgaataccccaatcacctatgccaagaacaccttcaccatcagtaacaacaataagcttaatatcgtctaaatcattggaaacagcttctatagatttttttatattttcgggatggtttatagataagaagacagcatccttaggagtatcgtaattcttagagtaattaattacggcatctccaatagtaggggtataaactataggaagaagttcaacgatatgtttttttaccacataatagaaaagaattctatttgtatcgtatatgttcattaaataaaaatgcttatctaaagcatcatcaattgatttaagcttttcataaaccaccttttcttgctcttcaagagtcattacagcacaaggaagaagaccggttaaatcgtattttttcctttcttcaagagtaaaagcagtacctttattgaggaagggatttcttagtaattctaaaccttttaaattattcatcaaattcatttagtgagaagaacacagctcactaaaattcacctcttttcttttttttataacatagttatatacattttaatatctttatataattatataccaaattatagcttataaaaaacataaaataagctataaccattaaatatgtaggctatgttttagaaagatgttgatattgaacgtgtgttcgcactgcggtataataatattaaagttacttgtttaggaggttgtcattatgtcaagtgtgagttctataataaacgaaattgaaacacttaatatacatgaacaagagcagttactttcttttttagaagatgttcttaattcctatgcaagtgaaattacagaagaagttagagaaaataggttctcaaaaggtaaagtttaccttcattgtaaattagaaatgttttcaagaaatggaaagcatgacgaaaaacaaaggtatgtatgcaaaacttgtaaaaagacctttactgattttacatactcacctatttcaagtagcaaaaagcctttagataaatggcttcaatatgcaaaatgtatgattgtagggtattctattagaaagtgtgcaaagacagtaaatattaatatcgcaacatcattcttttggaggcataagatattagaggctatcagaacatttattggtgttggttctgttgatggtgttgtcgaagcagatgaaatctttttagagaatcttttaaaggtaatcataaaaagagtacatcatttgtaatgccaagaaaagctcgtaaacgtggtgaaaaagctaaaaagaggggtatatctaacgaacaggtatgtgttgctaccgcaatagatagagctggtaatattattgctgaacttatttgtaaaggaagaatgtcacacaaagacttagaaaggctctataaagaacgtataggggataagtctattctttgcacagattcacataaaagttatatacaatttgctaatgatttaagtttagaacaccaaagaataaaaagaggtcattacaaagaaggtatatatcatatacagcacattctactgttaaaattaaagattataaaacaaggaaacctatttatgtataaatttcattcattttacatatttttcgtgttataatttacatgtaatttagctataatcaaatatatttacaaaatggtatatatatttctatgaagactaatttataattcggattttgaagggattatatggaaaaagaaaatatgaaagttaaaacttcaactgaacaacatattaagataccatggcatttatggttaattggattgttatttgttttcatttacgctaatggagtttatgactattttatgatgttagggcataatgttgactattataattccaagcactatggagaagctgtagttgcatattttacaaattatccaatagtgtttttgattttatatacaacgaatattttctgtgggttgatttgcccaattttgcttttatttcgtatccaatgggcaatgtggataggatttgcttctgctgtttctatgttcttcttagaagttctaacatttgcatttagaaaccgttgggatgtttttggtccttttatatctattttcgatataacattattaataataacatgggggttattcttctattgcagaaagttaacaaaacgaggtgtactcaaatgatgttgtacttgatgtgaaaaaaggctaactcattggctcaaatttcaatctgtttaattgaaaacataaaacaaattattataagttgttgtaaaaaatttactcattatgcaaattagaggatagcttaacctatcctctaattttatattaattttcaacataattttaaaacatatccaatatgtaaaatgaaataattattatacagtacaactttttaaaattggtaatgtagtaatacaaagaatttaataataacagattaataacaaagtacacttatataaaggaatttatggtatttaaagtatatcatacaagttacaagaggaaacttaaattgccaattatagaatatttaacttaagatgttttatataactacgatattttaaactaaaggacaaattaataagaggtggtaatgaatgtcaataaagaaaaaattgtcaattgtaattatagctttagtaatattttcaacagtagctgtgggtgctgccatatgcataaatgaagtaagtgctatggacaagcaaagcaaaggagaaatgcaatcagtatctagccaatgtattgataacattaatgctgttgtaaataaggaacaatcagttaacagcttggttgcgtccaggaattcaatagttcaattattaattaaaaacccggatgggcaaagcttgcctgaagtaactgaaaacaacgaatggcttcaaaattatgtgaaaaaagctggaaatatatcacatacgtttgttcttgatagcaaccttaaagatatttctgatagcaatgcttcttttgttggaaaaagctatgctgataagaaatacgctaaagatgcacttaatggaaaagaaactataagtgatacaactatatcaaatacaactcataaacctataatagtttttgcaagtccagtagttagtaatgggaaggttattggagttgtggcgtcatctgttgagggtgctagtttttcaaagtttttaaagaatgttaaaacctatagttcaccttcaagttatgtttatatggtagatgaaaagaagaacatattatacaataagaaaacacaggatataggaaaaccaataggaaatggaaaaatgaaagaagtaattaatgcattaagtgaaggaaatgcaaaaacaaaggactttgtcgagtatacagataaaggtcaatcaaaggttgtatattactaccaaatgcctaatttaaaatggacattagtgcttgtttcatttaaatctgaaattatggtggctccaagaaatacaatacttatgtctgttattttaagtgctatattggctgtaatagcctgtgctgtggggatagttctttctaagagaattgcagatcctatacttgacatagcaggtcttgctgatgaaactgctaaacttaatctagtaattgatcataaatatgataaatataaaaactttaaggatgaggtaggaataatatttaattctgtagctgatataagggaaacatttagaaaacttgcaggacaacttaattctgtttctgaaaacataaatggaaatgcagataaggtttttgatttaacaaaagagcttaaatcttatgctgatgaaacctctggtgaaacagaaaatctttctgcaggaatggaagaaaattcagctactgtggaagaggtttctgcttccactaatgaagtaaatagttctatttctaatatagcagaaaaagcagaaaatgcgtcagagttaacttataatacaaataaaatgtcttcaatgataaaacaagacgttgtaaactcaaaaaggtctgctaatgagatatatgctaatgttaaggttggacttgaaagtgctattaaaaaatcagaagttgtaaaggaaatagataatttagctagtgctattcttcaaataacagagcaaactaatttacttgcattgaatgcagcaatagaagctgcaagagccggagaagcaggaaaaggatttgcagtagtggcagaagaagttagaactttggcagagcagtcaagtgatatggctagtaagattcagagtgttgttgaaacagtaaacttgtccgttaaagagttaaatgatcaatctgttaaacttttaaaatttgtggatgaaaatgtatataaggattatgataaattcataaattctgctgaaacatacagtgctgatgcagaaaaagttaatggattaatgagcgaatttagtactacttcaaaacaattaaattcatctattgacggaatttctaaggctatatctgaaattgctatagttgttaacaatggagctataggtgttggaaatatagctgaaaagtccttgaatattgtggaaaaagttaaatttattgaagagagcgtagaaaataataaaaacagtgctaatgaactcagtaatataattagtagattcaaagtttaattagaaaaagaggggttgtagaattttatgataaatcaaaatgtgtcaccagaaaaattagcagaggcgttttcaatagtaatgccttacttagaggtgtttttcgataaagagttagcagtagctgttgcagataaggaaaaatatatagatgttttttgtactgataaaatgccaataagaacaaatgctaatgaaagtattcccaaaggaggagcggtttacgattctctgaattcaggtgagaatattataaaaaaggtacctaaagaggtttacggaatttattttaaatcttatgctattcctataaaagatgaaagtggagaagttaaaggtatagttgtaggagggaagagcctggaaaaaagcattaaattatatgatttatctaaaaatattgctgaagggatgagtcaaatagcttctgtaattgaaaatttaactttgggtgttcaagaattagtgagattaaatgagaacaccaataatattgtaaattcagcaatagagactacaagaaatacagatgacatattaggatttgtacaaagtatatctaagcaaacaaacttattaggtattaatgctgctatagaatctgcaagagcaggtgaaattggtaagggatttagtgtggtggctcaggagataagaaaattatctaattcaagtagtgagtcaataggaaaggtagattctgtgcttaaggaaataactaaagccattaataatatttacgatgatacaaaaaacactaggggagcatttgatgaacaggtatcagcttttgaacaggttaatgcatcaattcaggaattgaattctacatctcagatacttagagatttagctgaaaatttataataaagtccttattaaaagagacaatggtctaataatagtattgtctcttttaaatttgacttaatagaggaaatgttataaaatcttattaaatgatattgataatcataatcatttaataaggaggagagtttaatgagtgttttgcttataggtggagataaattaggaaatataaaggataaattaaaggaaaacggatttagtaaaatagaacatgttactggaagaaaatcaggcaataaaaaaataaagataaattcaaatttagatttagttctagtattggtggattttgtaggtcataacttggtagatataataaaaagagaatctaaaaaatcaggagttgcagtgaaattttcaagacggtcatgggtatatatggaggatcagctccaaggatatatacaagagatagtggataataaaaataaaatggcttaaaataatatacgtataaaaatttttaagaacaaggagcaatttaaatgagatatgttttagtctgtattataaatggagaggcagctaagcttaataataggcttgcttctgaacttaagcatgagtttaatgctagacgttctaaattgccgccccattttaccataaaggcaccctttgaaactgatgaaaaaaacatagatgatatgaaaaacattttaaagaaatttgaaagtagttttaatgcctacaatatggatataagtggattttcgagttttagaaaagatgtaatttatatgcctattaatttatcaaaggaggcaaaagaagttcacgacaagttaattgatgaacttaaaggactaaagtggcttgagtggaaaaataacgagggaaaaaacaaggttttccattgcactgttgtgagtaagagagttagagaaaactttgatgaaatgttaaggtatgtcaatgattatgaatgcaattttaaatctgattttgacaacataacattatacaaatgggacacaaacacttgggtattagaggaaagttataaattgcaaaaatagattaattaaatctggagaattatctctggatttaattaatctttttttattgtatctgtatttttggggaccgaccttttaagaattaaatggtacaaattagttttctatgtgatataatttattataataaatatatttatacaaaagagggggattaattatggcacttataatgaatagtaaaaaaaagatagccttagttgcacatgacaatagaaaaaaagctttgattagctggtgtgaggcaaattcggaagttttaagtaatcacagcctttgtggtacaggcactactgcaaagcttataaaagaggcaacaggacttgaggtttttccatataaaagcggacctatggggggagatcaacaaataggagctgctatagtaaatgaagatatagattttatgatttttttctgggatccacttacagctcagccacatgatcctgatgtaaaggcacttcttaggatttctgtactttatgatattccaatagcaatgaatgaatctacagcagagtttttaattaagtcacctattatgaaggagcagcatgaaaggcacatcatagattattaccaaaaaattagaaaagacaatttttaaaacattaggttaaagttattgtttttaaagttttgggagagtgagtatattgaaaagaataaggaatatctctgtagtagggatgggtgctgttggttgtgcatatggtagaaagttatataaattaaatcctaacaatttcaaaattatagcagatgacaagaggaaagagaaactcactaaaaatggtttccttataaatggagaaaaatatgattttaagtgcgtatcgcctaatgaaaacttaggaaaagatgatttaattataatagctgtaaaatataatcaattagaagaagctatagaggaaatacgaaattatgtaggtgaaaatactataatactttcctttttaaacggtattaaaagcgaggaagaaataggcaaagtttatggtatggataaaatactatattcctattgtgtgcttgagtcaactagaaaaggaagcgaagtttatgtatcagatgggtataaaatagtatttgggcagaaggaaagtgataataagtatgaaaaaatcaaggctgttagagaattatttgatgatgctgaaatagattatgaaattcctgttgatataattcattcaatgtggtctaagttcatgtttaatgttgggataaatcctgtttctgcaatacttaaagcaaattatggaatgcttcaaaagaacaaatatgcaagagagaccatggtttcagctatgatggaagtgattaatatatcacaaaaagcaagtgttaatctaaaaattgaagaaattaatcattggttagctgttttggatgaatgtgaactgcacggtaaaacctctatgtgtcaagatatactgatgggcagaaaaacagagatagacatgctgtcaggtgaagtttgtgctttgggagaaaaatacggagttgatactcctgttaatagaactctatttaatatggtaaaatctattgaatagactaaatataaagccaacttaaggttggctttatatttatcagcttaaatttattaaatttgcagtgggaatatatctttctattatttctttagataaattcacccagcttttgcatctatcaagtattatagaatcagaagttacaacattttcaagttcaaatagaaccgcatcagcatttggaaccaaatctacatttacattaattttttcttctttaaaatggtttgaaattctttcctttagtcttccagaatttgatactggagaatccaaaagaaaattaacttctgatatttcaaagtctttataggtttttactacagcatttattgctttatctgttttatctatgagtttgtagcttccttgtattcctgctatatcacgtatgacagaatcattaccaattactaaaacgccacctgaaaatgcaacttctagggttattattaagttgaatccgtcaacatatagcttttgatactttaaatttgaaatgcaaagcgattttgattttcttaagttagtatagtattcggaagaagttgaacgtctaagtgcctgtctttgacgaagtgaaaactgatagtgatttccaattaaatttatagatgaattcatattataacctctatttagaagccaaaatagttcctcatgtgccttttttaatcgtgaaatttcttctatagaaaagaatcttttatcaagaggatctacacctctgtttccaattcttaagctttctttattattaaaattcaaaaaaatacctccagataatttattcagtatcttcattttctagttctataatagtcatgatgctgtaatttgcaaggtccataagagtatcgattatgctttcgtccttaacttcagctttgttttttattagttgtttgtatcggcttaatttgtcatctagtcttatagaaggcattaccaaaccatattccttaaaacctattccaaaactgtcgccgtaatctttattttttgctgcatataattcatttaacctcttacatatttctttgtgtttatcagtcttattcattgaaattaacctcctttttttatagaatttgcaaaaaggatacaaagttattcattgatattatacaatattattgaaagatattaagtaaattgagtgaggttatcatttaatttgttttttgtaattacaggtatataataatttagtatagccaatttattaattatgctataaggagatgattttgtggaaaataataattgtccattttgcagcagtaataattttgatataatatgtgaaaataaattagcctttgcaatattagataaaaatccagtaaatgaagggcatactttgataattactaaaaggcattttccattcttttttgaagcatcaggtgaagaggtaatggcaatgtatagtcttttgcatgaggcaaaggggatactggacattcaatatgagccttcaggatataacataggtgtaaatgtagggtattatgcaggccagacagtaaaacatatgcatatacatctcatacctaggtataaaggagatgttgatgatcctaaaggtggaattacaaattttaaaagaaatatataaaaagtaaagctttgtctcaattttatcttgagacaaagcttttaagattttttcttgaattcggttccgcactttttgcaggttacaactatttttccctgttttctaggtactctaagtttctgagagcagtttgggcatttaaaggttttgtaattcctaaaagaatatagattttgctttaacctgtagattctttgacggaatattaaagagaaatcctcaaaggcttgaagttcacgatatcttttgtacttgtttttggaaatacttctaaaagtagctgctgcaattagcattagtccaaataaactactgtatttgcttaacattaaaagtaaaccaataatggatagataagttgataatttatcccatccgtatgaatctttaaaatatcttgtatacttattcaaggtaatccccccttaaaagtttttgtatatggttaaaaaaatgtatgaactctatataggttttaaatatatttttaacatataaataccctttattcaatgaactaggtgttaacattttattaataactattggggggatattttctttaagctgtatgggattttttgaaaatatgaattaaatatcctagtataagacctattagtgcaggcacaatccagccaagtccttttgtgtaaagaggcaaaagattaaaggtactatttatagtactagattttatcaatgtttgatttaaagaatctaaaatactaaaaataccagtgaaagacattcctaagatataaacatattttgaacctttaaataaattacttagtaaaaacattatcataagtattattgccatagggtaaattgcatttaaaactgggacagaaatagaaagtatttttgttaaaccaatgtttgcaaaaagcatacttaagaaagcgaaaataaatacccaggtcttataggataatttgtttttggttaaagttgtaaaatattcactgcaggaggttattaagcctgtagctgtattaagacatgcaagtgaaaatattacaccaagtattattattccataatgtccaaataagtgagatgcagcacttgttagaatttcaccgccattttgagcatttaaggaaatagttctgcttgaggctcccacataagagagcatagcataaattattataagcatagcacctacaattagacctgctttaattgagtaagatattatagatttttcacttttaactcccatagattttaaagtggatgaaattacaattccaaagtttaaagcagcgattacgtccattgttagatagccatctgaaaagcccttaaaaaatggaaaggacgaatagtctccctttggagttccaaaagcgcctataggagttataaggctttttataaatactataaaaattagtactagcaatataggggttagtacttttcctaaacgatttacaagtttggaaggtgttaaactaagccaaaatgcaattgaaaaatatattaaggtgtatattaaaagtggtattggacttgaagcaaggctttttggtaagaatggtgatacgcccattgtaaaagcaaggcttcctgtccttggaattcctaaaaaaggtcctattgataaataaattaatgcagtaaatattagtgcaaaggttggatttacatgtgctgcaaggttaaacaagcccttagatttagatacaattattacagctaaaataggtagtccaacagcggtgataataaatccgctaaaagctatccatacatattttccagatagttgtcctaaaaatggtggaaatattaggtttccagcgccaaagaacattgagaaaagaagtagacctacaaaaaatgtgtttttcttagataattctttcattgttattatgcctcccaaaattgtaattttaaaatttatataataaaaaaacccgtcccaataaagggacgagttatactcgcgttaccaccctgattccataaataattaatttatggcagctcaaaacacgtacgctattgatacgctttctttttaacggtggaaatccggtaaaacttacttaaattataagtttcagtttcacttctcaagaaggattttcggatatattctgaacactaactttcaccaagcgttagctctcttatggtatttactttagagtaaatatttagaacagatatatagcttactcttttctttcatagaatttatatatcttataccataaagttttttaaatgtaaataatttatgaatatcataatattaatgataaagcataaatacaatcaaaataattaaaaaatcaataaatagtaattaaaatacctataaataacgctaaatattaataaagaagtaataatacaatattacaaacttaaaagccttatgaatgtgtagggaattttaaaacatagaaatgatattaagcaaattgaagaaattaatagatttcttaaggatacatgatgaaaatttactatttactataaaattagaaggagattacattacaaaatactgattttgttgtatgatgttttgagatgtattttttgttaggatgatgtttatggctttagtaagaaaagatgtagttaaacttgcagctccaatttttgttgaacagttatttgtaactcttatgggaatgataaatactatgatggctggacacataggtaaagaagctgtttcagctataggtatgattgactcaataaacaatatatttatagcttttttttcagcgcttgcggtagggggcacagtggttgtagctcaatatattggacaaaacaatataaagaaagcaaatgagagcaccaagcaggcactttattctactattataatagcttttgttataactattataatggctatactcaaaggacctcttttgggatttttgtttggaagtgctgaaaaagaagttatattagatgcaaacagttattttggtataacgcttcttacttatcctcttataactatagatttagtatctaatgggatattaagaggtgcaggagataccaaaactcctatgaaaatttccatacttatgaatgtattaaatgtggcatttacagcattatttatatggggaataaaaatcaatggcactgttgtagtgaaaagtctaggaattacaggtgctgctcttggtattgccacagccagaacaataggcggtataattatacttatagttatggttagaggatctagaatagttcagcttaaaaaactaacggaatttaaatttgatatgacacttcttaagccaatatttggaataggagtaccagccagtgtagaatcactattattcaatggtgggaaacttattatgcagatttttatagttggaatgggaacggtagctatggcttctaacactattgtaaattcaatatcaaatttcttgaatatacctggaaactctcttgtcattgcagccacggctttagtaggacaacatatgggaagagatgatgataaaggagcagagaagtgtctttcgtatataacaaagctatcaactgttcttttagccatagttggtatcttatctattcttttttcaagacatttaccttcccctgtatactggaaataatgatattataaagttgtcatctaaagtattaattgccaatgcatttgccatgattatatggtcttcggcatttactttaccagcagggcttaagggagctggtgatgctaaatataccatggttacttcaataataggaatgtggctttttaggatagttcttggaaacttccttggaaatacaatgaagtttggacttttgggaatttttcttggtatgtacactgactggcttgtaagaggaattttgtatataataagatttagaagcggaaagtggaagaatcatgttgtagttaaaagagtgaagacttcagttaaagcctaattaatcatgtcatataaactgattttagaacactgctttaaatatttaaggcagtgttctaaaattatatgaaataaatatttaaattatttttagaagtggaggaagtaaatgaaagtatttaagaaatttattaagtattataaaccgtataaatttttattttttacagatatgatttgtgcacttatagtttgtttggttgatttatcctttccaataattttaagttatctttctaagaattttttcattaaggatagagatacagtattaacaggtattatttatattgcagtaggactagcaattatgtatgtggcaaaatatttttgtcagtattttatagcttcctgggggcatattatgggagccaggatggaaacagatatgagacaggatttattttatcatcttcaaatgcttccattttcatattatgatgaaaacaatacgggagaaatgatgtctaaacttgtttctgatctttttgatatatcagagcttgcacatcatggaccagaaaatgtatttatttcagcacttaagatattaggatcttttgttattctaatgatgattaacgttaagatgacttttatattatttgttgtgactttaattatggttattttctctataaacagaaatacaaaaatgcaaaagatattttttgacaatagaaagaaaatagctaatgtaaattcttcagtccaggatagtcttgagggtataagagttgtaaaatcctttgctaatgagtctgttgaacagaaaaaatttgatgtgagcaataataactacttaaaatcaaaggttaaatcctataaggcaatgggagaatttattgctggaagctcactttttcagggaatgctttatctttcaattatagtgtcaggtgctgtatttataaaggacggtactttaaaaatatcagatttggctatatacgcattgtatataaatatatttattaatcctattgatgtacttataaactttatggagcaatttcaaaagggatatgctggatttaaaagatttatagaggtcgttgaaactaaaccaagtatattagataaacctggagcagaggaaattaaaaatgtgaagggtaatataaaatttaaagatgtatgctttaagtatgatgacgctcacgaggtaattcacaaccttaatataaatatagacgctggtaagacagttgctcttgttggaccatcaggcggaggaaagactacaatatgttcactacttcctagattttatgatgttacctcaggttcaataactattgatgataatgatataagggacgttactcttaattcacttagaaatgcaattggtgtagtacaacaggatgtatatatcttctcaggcactataagggacaacatagcgtatggaagaccagaagcttcagaagaagaagttattgaagctgcaaaaggagccaatattcatgattatataatgagtcttgaagatggttatgatacatttgttggagagaggggagttaagctctcaggaggacaaaaacaaagaatttctatagcaagggtatttcttaagaatcctccaatacttattttggatgaagcaacttcagctcttgataatgaaagcgagaaatatatacaaaagtcattagaaaaactttcatcaggaaggacaagtattgtaatagcccacagattaagtaccataagaaatgcagatgaaataatagttataaaagatagagggataaaggaaaaaggaaatcatgaagagcttctaaaaaagggaggagtctattcttactactacaacatgcagtttgaggggcttaatgcttaaaaaacaatgatgtaataatgaaaaaaacagtgtgctataaatctaacacactgttttttatatatgaactatacgcttatagcttttagtgatgcataatttaatactccttttaactaataaatcattacttattttccaactatgattatctggagatgcatgtctattgtatacatagttgaatttactacaggagtatattttaattcctaaattattgcattgagataataaatctatatcctctccattatttaaactattaaacttaaccttattaaaaatgctttttttcatcacaaaggtagcacctgctacacttgttgcataggtgttttcattgccctgacaccacagatttaaaagcgttctatcctcaaagtatataaaatgagttgccttaccaataatactagcatcagtatagttaaatgcattcattgaatctaagatgtaatgggaaccataataatcatcatcatccattttagcaatatagttgtaattagatttacttatcgctaaatttaagcattctcctaaggaataagaagaatctactttaaaaagctttaagttctttgtttttgaaaaataattcttgtacaatgaggtttgaagctttgtatcatttaatataattataaactcttttttgggatacaaacatctgcgaaaattatccattatattctttatatatttttgtttgttagttactgttattattgtgattccaggtttttttgcggaatcatacatgtatctcaaagctagaactttttctttttcgtacaaaaagttatcagttacaattttaatcaccttcctatatttttactattggaatgtaattagtggttttataaaaatgaaaatattgtttttttagtgctgtagttggtattttccaagtatgctcatttaaggacttatgtctcatatatacataattgaatgggtcaattgagtaaatttttataccatgacttgagcaatcatctaaaaatcctgcatcctcactcatgttgacatctctaaatttataggttttaaataattctttttttataagaaaagttccaccagcaataaagttggtataatcatagctttgactataattgttaatagataggtctcttgtgtcttcaaaatatgtgaagtacttacatttacctattattttagcatccgtataattaaaggcgttaatttcatcagttaaataatttgggccgtagtaatcatcatcatccatcttagcaatataattgtattttgattgattaactccaaaatttaaacaatatcctaaggaatagcattcatttagctgaaaaaccatcacgtttggaatcttttctgcataagatttgtaataatcaatgtctatattatctatattaaaaatcaatattagctccttatacctgtagtttaatctagtataatttttaattgtattacgaaaatatttaggcttattggtggaagttattattgatatgggaggtttacttctattggaaaatgtatttcttaaattgatggtgtttagttttaatttatcaatagtcatttaaaaatcacctaatttaattttattatataatatgaacttaaaaagccttgtgctacatgttacaaaaataaaaagacatctactgcacaaaaactttctgcagcagatgtctttttatttatgagagtttaattttagttgttttagaactatattagcttgtgatttagtaagggttccgtcttgaatcagggaatgcagagggttagaaaattttttttcaaaatgatgatggattttgtgtttttgacaatttcggcaatggcagtgtttttcatttaagacatcgaaaattttatctgcctgactttgatttatggttttattttccacaagttcttgaagggtatttttacatctaagcttcatattgtattcaattgatttttccggaacagtaatttgatgtgcagccaaggaattttttgtgaaaattgtagaaatagaaagtgataaagttaaggttattaaaagcattacagtagctttatgtagtatatttgttttcattgtaaatacctccttaataagctttatgttatgtgtagtatttgatttcttagcaagaatattccatacaaaataaaatttctttgaaaaagtgaagtttttaagtgaataaaaatttctttggcagtaaaacatactattgagaggagtgatataaggtggatttatcaactcaggatatattaaaaactaagcttcttgatgttcaggaaaatgtaagagattttcaagagtatgcaaaaagaacagatgacagagaggttatagaaacatttagaaaatttgcaaatgaagcagctatggaggcaaaagaactgcagcaattgatagataaatacagtcaaaaagataaatagttataattttgagtttggagagaaaagaatctctctatttttttggtgaaatttaatctttatgttgtaattgcatattttattatgaagttgttgtagaagttacattaaagatgatatataatatagctaataaggagggatttaattgccaatagagtttaaagatgacaagaaaaataagctattaaaatacataggtgctgctggagtaggaatcgtatctattttgatgttttctgcaattaaaaaggacaagagtcataaggaacataaagatataagaaagaagcttagtcttaagcagtccaagaataagttaagagagtatttggataaaacagaagcttgagacttataactatagagtaagaggtggtacaagttgtacataaatatttatacacttttttttgtgatactaggattattaggaatagttgctttggttttcttaattatactattaaaacgcacagccagtttaatatataagataaataaattttgggattcaaacagcaaaaatatttcaagtacggtagaagaaatgccaaaagtcttaaaaaatgtgggcgatattactgaaaatgttaacttggtaagcgaggttgctacagaaatgacagcttcaattgttgacaaaacagatagaatgttagatggactaaacatatttaaagaaataataaatgtgttaaaaaaaatattaaaaaaatagatttaaaaagataagactatttgatttaataatcttatcttttttatattcaattattaattggttatgtttaagtaaagaaaaaatacgattgagtttgaaaaaagaagaataaacgaattaagcggtgaaaaaaatcacttaaatggttacttttaatgtaaaaatatgatataatatgttgcattagttaagaagtattttgtacattaaaattttaattaaatacattaaaattttaattaaaaagtaccttaattattaagtatacagaatcgctgtatactgtgtaatgtaaaataattgagtacatattcgattattttcgtttccatctttcaatctatggtattaggataaatttattatcctacttttggcgaaaggtatgagatttctctacttttcgcatttttttatattggtatatagaattttgtataatatatgtcatatatacaaaaacttataaagggttactaaaatgttttatgagttggagtgtgaaatagtggcaaattataataaaaagctagtgccagaaaaggcggaaagattaaatagatttaggatggaaactgcaaatgatattggagttgatttgaaagcagaatacggttcggatttgacatcaaaggaagctggttctgttggaggaaaaatgatagataaaattttgcagggctacgaggataaaatagaataggatataggcaaacagcttatatcctattttcattataaaataaattattataattgatgtaaagcatatagtaaagtgaataccataatgaagaaattttaatagcagattgtggtataattaaaatatggttagtgaagatatttataaatttatgcaaatatcctaaagctagagtgtacatattataaattgcatcgggggggaaaatcaaaatgaaagaatataattatatttttgggcctataccttcaagaagaatgggaaattctttaggaataagttcaatagaaaaaagaagctgtacatactcatgcgtttattgtcagcttgggagaactaaaaatttaatgaaagagcctaagaagttttttaaaactgaggatattttggaggaatttaaggagtaccttaaggaagatgtagatatagatgttgtaacagtagttggtgaaggggaaccaactcttagcgatgatttagaagaattaatactagggctaaaagcaattacagacaagccagttgctgttataacaaatggatctatgctggtatatgaaaaggtaagaaaagctcttaaagcggcagatatagtgcttccgtctcttgatgcaggggatgaagagacttttagaaaaataaataggccaaatgcaaagatagattttaataaaatcacagaggcacttgtacaattttctaaggaatataatggtgaattatggatggaaactatgatagtaaagggttttaatgataaaacagaggagctttatgctataagaaaaatattagatagaatagattatgataggttatatataaatactcctgtaaggcctcctgcagagagttatgttgaggaaccatctaaagaaaaattagatgaggttataagaatactaagaggaacttcaatacaaatgctttcatctggaacattttttagtgagattacagatgattttgaggccattaaaagtataatatcgaggcatcctatgaataagtttgaggtagaaagttttcttaactcaagaaaatgccgtgataaagaagaagttttaaggaagcttaaaaatcacgctgatatagatgtggtaagttacaaaaactacactacatatagacttaaataacggaggattaatatgacaagatcagtaaaaagagttgctgcaatacatgatttatcaggatttggtagagcttctttgacagccataattcctataatgtcctatatggggattcaggtttgtcctatgccaacggcagttctatctacacatactactgattttcatgagtatagttttgttgatttaacggacagtatgcaggattttatgaatcactggaagaagattaatttggaatttgacgctatatatacaggttttttgggttcgccaagacaagttaaaataataagtgattttgtaaaggaattttcaagtgatagtacattagttcttattgatcctgttatgggtgatgagggagaactttatcaaactatgaatagtgaaattgtaagaagcatgagagagcttataaaaagtgctgatataataacgccaaattttactgaagcagcatatttactagataaggactataacctagaattgaatgaagaaactataaaagaatggattttagaattagctaatatgggaccggatattgttattatgacaagcgtaccagaaaataaagataagagtactataagcgttatagcttatgaaaaaaagctgaataagttttggaaaattacaagtgaatatatacctgtaagttacccaggtacaggtgatagttttgcaagtgctatacttggacgtattttaaaaggggataaccttcctcaagctgtgggaagaggaatgcagtttattacttcagctataaaagaaagctatggatttgattatcctactcgtgaagggattcttatagaaaaatctcttgaagtactaaatttaccttttatgaatggtaattataaattaatttaagaggagggaagctggcaggcgaaatatgacgtttaccagggagtgattatggattcaaatgtttcatggatgattagagaaaaaatagaaagaactataaagaaccttgaaaagaataatattgaagcatacaatgtaaaaaattctaaacaattaatagaacttatagacaagcttatacctgaaggtgaaacagttgcagttggaggttctatgacgctgtttgaaacaggtataatagaccatataagaagtaagaattataattttttagatagatacaaggaaggtttaagtaaagaagatataaaagatgtatttagaaaaagcttttttgcagatagctatatagtaagtactaatgctttaacagaaaatggagagctttataatgttgatggaaatggaaacagagttgcagcaatgcttttcggtcctgataaggtaatagttattgcagggataaacaaaatagtaaaggatgtggatgaagcaataaagagaaataaatttgtgtctgctccgataaatgcaaaaaggctgaataaagctactccatgtacaaaagttggatattgcatggattgtaaaagtcaggacagaatttgtaatgagtatactttaataaaaagacaaggagtaaagggaagaattaaagtaattatagtggaagaggagctcggttactaagtaaatattttaaagcgtaagttccaattgtgaatagaaaaatgagtgtagtaaatattataaatatagtttaaattaatttaatgtagggcaggtagattaacgcatggaaaaaatagcattgataacggatagtacatcagatgtagataaagatatgatagaaaaatatgatataaaggtacttccacttagaataatatataaggataaagaatatatagacagagtaacaatttccccaagagaagtttatgacaacctacatatagaagttccttctacatcactgccatctatgggagatatggagagtctatatgagaagcttgaagctgagggttatactcacgttattggagttacaatatcttcgaatttgtcaggaacctataacagtttaaagcttgttagtgagggacatgaaaatattaaaagttttatttttgattcgagatcaataacaatgggagaaggagctatcattaaagagtgtggggaaatgatacttcaaggtaaaaattttgattatatagttgaaaaaatgcctaagatgagagaaaacataaaggtttattatatagtggacacattaaagtatttgataaagggaggaagaataggtaaggtttcaggaacagttggacaattgcttgatatcaagcctataatttctataaatgaagaaggggtatattatactcactgcaaagcaaagggaaaaaagcaggcaattaaaaagcttattgaaatattaagaagaacactttctgaaaagcattgcgatatatgggttatgcacggcggtgcttatgatgaaatagataagttaaaggatttggtttcaggtattgaaaatatcaataatttaaattcgggggagattagtcctgtggcgggggtacatacgggacctggacttcttggagtagtaatatttaaaaaatagaacatggggggaaatcaaatgaaaaattttgtatttgtatctgattttgatggaacaataagtaagagggatttttataagataataactgacaaatacttaaaggatgaagtaaaggatttatataaagaatggagaagtaataagataacagatgttgattatttaggctatgtatttagccatataggaagaaatgagaaggaaatacttgaggatatacttacaatatccatagatccttatataaaggaatttataaaaaagataaaggaaaagggaggagattttgtagtagtaagtgctggaactaactactatattgataaagtcttccaaaatattggcatagataatgttgatatatattcaaataagacagtatttaaagacaatggacttcactttgtgttaaatccaaaggatgaattttattctgacgtttatggaatagataaaggtaaagtggtaaaaaaattaagagaaaactatgaaaaagttttttatgcaggagatagtacacctgacatagcaccttctcttttatcagatgtggtatttgctaagagcaagctttgcaattttttaactgaaagaaataaagagtttataagctttgaaggctttgatgaaatattaaagcatgtagaaaaatacttaaaggagtggggaatttgaaaggaatatctcatagaatagcaattcctttaatacttgaggttggaaacaataaaatatataatatagggcaaataataaaaaaagggaattttaaaagagtctcactttattttggtgagggaatatatgagttatttggtgaaactattgagaaatctataaaaagttcaaatatagaaattgaagctgtagaaactgttaaaaatatagattttgatgaaattggaacaaatgcttttaaaataccagcagaggtggatgcacttataggtataggtggaggaaaggcaatagatgcagttaagtacatggcatttttaagaaagcttccatttataagtgtaccaacatcgacttctaacgatggtttttctagtccagttgcatcacttttaataaatggaaaaagaacctcagttcctgcaaagactccggatggaatagtggttgatatagatgtaataaagggttctcctgaaaaatttatatactctggaattggagatttggtatcaaatataacagctctttatgattggaagtttgaagaagaaaaccataagtcaattatagatgactttgcggttatgatatctaaaaagtcagttaatagttttgtgagaactgattttaaaagtataaaagatgaggtattcttaaaggagcttgtagattcacttacaatgaatggtatagctatggaaatagcaggaaatagttctcctgcaagtggagctgaacacttgatatcacacgcattagataagtttttaccaaatcctcagttgcatggaattcaagtgggagttgcaacttatataatgtctaaggttcataagcatagggaagaaagaataaaaaagattttgagtgatactggctttttcaactatgtgaagggattaaatatgaagaagagtgatttcaagagggcaatttctgaggcgcatcttataaaaccagctagatatacttatcttcatgtagaaaaaaattgtgagacagctaaagagattgtggatactgacgaaatattaaggaatatattggtataaaataaggacgtttatacttttcatatgttgacaaattataaaaaacattttatgatttaaaattagtggggtaatgacttagtttcattactttattttttatattgattatcggaggacggacttaatgaataaaaatgaaaatattgaagattatgatgttacctcccttacctctctggaaaaacttgaacctgtaagaataagaccgggaatgtatataggttcaactggaagtaagggacttcatcactgcatatgggaaatacttgataatgccatagatgagcttacaaatggctttggtgatatggccaagataatattaaataaagataagagtgttactataatagataatggtagaggaataccaacaggtatacatccaataaagaaaaagtctggagttgaaatggtgtatacagaacttcatactggtggaaaattcaacaataagaattataagacatcaggaggtcttcatggagtaggagcagcagttgtaaatgcactttcaaagtggactgaagttgaggtctatcaaaatggatacatatatagacaaagattcgaatatgcctatgacaaggaactcaaaagagatatgccgggtactcctgttactgaaatagagaaaataggtaaaactgataaaaagggaacaaaagtaacatttaaaccggatgaagaggtttttacaagtacagactttaaatttgatgttatagatgaaagattaaaggagatagcttttcaaaataaaggtataacattaatacttgaagatcatagagaagatgagcctcaagtaaaaacatatcattctgaaaggggacttcttgattttatagattatcttaatgaaagcaagacggttatccataagaacccaataatatttgatggtgagagagaaattaacggacttaaactttatggagaagtatgtcttcaatttacagattcaactacagaatatattgcaagttatgtaaacaatattccaacaacagaagccggtacgcatgaggcaggttttaaaacaggtatgactagagcgttcaaggagtgggccaagaaacttggagtattgaaagaaaaggataaagaatttgaaggtaatgacgtaagagaaggtatgacagctataataagaataaagcttacaaatccggtttttgagggacaaactaagacaaaacttggaaacaatgaagcttacactatgatgaatgatttggcatattcaggattttctgaatggattgaagacaacaaggataccgcaacaatgataataaaaaatgctgtaaatgcagcttcaagacgtgaaaaaataaagaaaataaatgaggctgaaaaaaagaaaataggaaaaggaacatcacctttagcaggaaagatagctgtctgtactcttaaggatgcatcgttatgcgaatttataatagttgagggagattcagcaggaggaagcgcaaagcaagctagggatagaagatttcaaagtataatgccatctaagggtaaaataatgaatactgaaaagcagaagcttgaaaatgtgcttggaagtgaggaattgaaaatatttaatactgctgtgggaacaggaatacttgataactacagagaagaggatttaaggtacgacaagataataataatgagtgatgctgatgtagatggttatcacataagaacattgtggatgacttatatatataggtatatgagacagcttatatcaaatgagcacctttatatagcactaccacctttatataaagtgtacaaaaactctaagaagggtgaggtagtagaatacgcttacagcgatgaacagcttgataaggctaaaaaagaggttggaaaaggatatcttatacaaagatataaaggtcttggagaaatgaatccggatcaactttgggaaactacattaaatcctgaaacaagaactcttcagatggttacaatagaggatgctgcaaaggctgaaaaaatggtatctctgcttatgggagacgtggttgaacctagaaaaaattatatgtataaatatgctgaattttaatagtttggggaggacttaagatggcaaaaaaaattaatatacctaaggacagcaatattataaaaatacccttagaggaggctatgcctgaaaattaccttccttatgcagttgaagttgcaagggatagggcgcttccagatgtaagagatggcttaaaaccagttcacagaagaattatatatggttcatatatgctgaaggcatttcctgataaaccatactataagtcagctagaatagtaggtgatattttaggaaagtatcatccacatggagattcttcagtttatgaatccatggttattttagctcaaaacttcacaacaagacatcctcttatagatggtcacggtaactggggaagtgtagatggagatagtgctgcggctatgcgttacactgaagctagattgactccaatagcattagagatgataaacgatatagataaagatgtagttgatatggtggataactattcaggatcagaaaaagaaccatcagtgcttccagctgcatatcctaaccttttggtaaatggagcctttggtattgcggttgggctttctactaacattccacctcataatttaagagaagtaatagatgctgttttaaaatatatagataataaagatgttacggttaatgaacttatggagtgtgtaaaaggacctgaccttccaacaggaggaataataataggaaaaaattctcttatagcagcctatgaaacaggagaaggtaaagtaaccttaagagcaagaacaaaaatagaaaggcttgaaaatggaaggcttgctatagttataagtgaatttccttatagaagaaataaagcaaagatacttcagacaatttcagagatgacggcagataaaaagcatgccaaaattcttgagagtatatcggatataagagatgaatcagatagaagaggaattagaggagtaatagaatttaaaaaatcatcagacgaagatactgtaaataaaattcttaagtatttatttaagaaaactgaacttcagtgtaatattaactttaatatggtagctttagctgatggaaaaccagaaactatgggattaaaaactattataggtcattatgtaaatcatagaaaagatatagttacaagaagaactaagcacaatttaaatgcagcaagaaagagatttaacatagttgaaggttttataaaggcaatagacataatggatgaaattataagcactataagagcttcaaagtcaaagaaagattcggaaaacaatcttgtagctaagtttggctttaataatgaacaagcaactgctattgttgagcttatgctttataaacttacaggacttgagatagaaacctttaaaaaggaatatgatgagctttcaaaattaattaaaaagttggaaaagatattgagtgatgaaaaggaacttcttagagttgtaaaaaatgaacttaaagaggttgaaaagaagtatggagaagatagacgtacatcaattgttgaagatgatagtgaggctaaaattgatgtagaggagtttactgtagtagaggacatagttgttacaatgtctaatgatggttacataaaaagtgttcctaaaaaaacctatttaagatctaattcagatgtttctgatatagagtatagagagggagattttaacaggttcttaatagagaccaatacagcccacaatcttcttatgtttaccgatgaaggtaatatgtataaactcagaggtaatagtattccagaatacaagtggaaggaaaaaggagagaaaattgataacctgataaaaggtatcgatttgggtaaagagaagattttgaatatatattcagttgaatctttaacagagcagaaagatattatattcataacagatagaggaagcttaaagaaaacctcacttgataaatttgatactatatactctaaaataatggcactgaagcttaaaaaggatgagaagcttataaaagctgaattggtgttaagaactagagaagagggctttattaaggtaagtacagaaaaaggtcttgattttactgtaagagagcctttaattgaagaaatggatagaaataaaatggggcatcaatgtataagcgtttgtcctatggataggattgtttcgtctgaatttgtagaaaacgatgattacagaacttttggaatacaaataaataaaaatggaataattaaaacaaaggcttcatcaagtggaaattatatagatacaacaacttcaagtacccttttaatatttatagatgatggtagagttattaatattccatcctacatgtttaaaaatatggacgacaaagtgcttaatttaagtgagctttattgtgagttcaattctaataataaaataataaaaactctatctatagaagaatttaatgaaaataaattcatatacttcttcagttctaagggctttgtaaaaaagactaagctcagtgaatttgtggagagtaaaggaatagaagtatgttataaattaagaaataaagaggatatgctcgtaaatgttgatgtttcagaaaatgaggaagaagaggtagtacttataactaaaaaagcaatgggaataaaattcttgtcctcatctgtgagtgtaatgggtaagatagcctcaggggttacaggaataagtttaaatgaagaggatattactgaatatggcttcgtggttaaggaaaatctcaataaaataatacttaaatctaaacttaacgataaaattgaagttgaaattgaagatataaaagttcaaaatagaggtggtaaaggtaagaatcttactacacttttgatgacagattttattagtgaaataaagataaaataggaggagtgtattatgaaaattgttttgttcttagcagaaggctttgaggaagtagaggcacttactgtagttgatatacttagaagagctgatattatttgtgatatgtgttctcttgaagctaaagaagtagttggagcacataaaataaaagtttgtgcagataagactatagaagatattgatattgctgaatatgatggtctagttcttccaggtggaatgccaggagctgaaaatctaaggaacagtgaatttgtaataaatgcagtgaaaaaatttaataaagaaaaaaagattgtggcagcaatttgtgcagcaccaatagttttaggaaaagcagaagttttagaaggaagagatgcaacttcttatccaggctatggagatgaaatgggaaattgtaactaccttgaaaagataacagttaaggatggcaatatacttaccagcagaggacctgcaacagctatatattttggattaaggcttgttgaaatattaaaaggaaaagaagtagcaaatggcttaaaggacggaatgatgcttaaatttgttgaaggtgaactctcaaaataatatttttaaattaagtggcaggtgattaagttcgcttgtcatttaatatttggagtgaattttatatgaaaaagatatgtatgaaaaatggaatgaaaattatatacgaatacagggaaagtgacattacatccttttgtgttgcatttaatgcaggggcagaacgcgaaggaaagaaagagcgcgggcttgctcatgtggtagaacactgtatttttaaaggaactaaaaaaagaagtgaagcacagataaatagtgagtttgatgagatctttggctttaataatgctatgactaattttccttatgtcatatactatggaaccacgctttcaaaggattttgagaaaggctttgagctttacagtgatatcatagtaaatcctacttttagtgaggaaggctttgaggaagagaagagcattatatgtgaagagctaacggaatggaaagatgataagcagcagttttgtgaagatgagcttcttaaaaattctttttccaatataaggttaaaagaatgcataataggaaatgaaaagaacataaaagatttttcaatagatgagttaagaaaattttacaaaaaatattatacatcagataattgcgttataggtattgtaacctctcttaaagaagaagaggttacagatattattaataattacatgacgttaagtaagagagaaaaaccttctttatttgattatgagtatgaaaaaaatacttcaggaatatttacaagtaaaatggatgtaaagggagcggttatacagtatttgtttcccatttataaattgaaggatgatgaaataaaggcacttagagcttttaatgttatattcggtgaagggactagctccatgctgtatgataaaataagaactaaatatggacttgcatatgatatatatagtaaaataaataacgatggtggaataaaattattctacataggacttggaacagcgtctgaaaactttgacaaaagtattgaatttgtaaatgatacaatttgtgaagctaaaaatttaaaaggacaattttcaagtgataaacttttaaagatagaaaaaactatgtctttaaaaagaagccttaagcttgaaagatctattcagttggcgaaagagcttgccacctatgaattaatgtatggtaaagcggaaaatgtatatgacgaagtaaaggatattaatttattaaatgaggactacataattgaagtggtaagaagtgtattagtaacaccttcaattcaagtagttaaacctaataagtgaggataggagaaattatggataatataataaagttaattaataaagcagaggtaacacatgatttaacaaaggatgaattagtaactttattgaaggatgatactcataatgaagagatatataaagcagccgatagagtacgtgaaaaatatgttggagaagaagtacatttaagaggtcttattgaattctctaatatttgcaaaagaaattgtatgtattgtggtttaagacgtgataataaaaatataaaaagatatagactagaacctgatgaaataatacatcttgctaagagtgcaaagaattatgggtatcaaacagttgtacttcaatctggtgaagatgactattatactgttgaaaaaatgaaatatatagtaagcgaaattaaaaagctaaacatggctattactttaagcattggagaaaaaacctttgaagagtatgaagagtacagaaaatctggagctgatagatatttaataagaatagaaacaacagataaagaactgtatgaaaagttagaccctaaaatgagccatgaaaataggataaactgccttaaaaatttaagaaagcttggatatgaagttggttctggatgtcttgtaggtcttccaaatcaaactatagaatccttggcagatgatatattattttttaaggaaatagatgctgatatgataggggtaggaccttttatacctaacgaggatactcctcttggagaggaaaagggtggagagtttttcatgagtgtaaaggtaactgcattgattagacttcttctgccagatataaatataccggcaactacggcaatggaatccctttatccaaatggaagatcaatagctcttacaagcggtgcaaatgttgttatgcctaatgttacagaaggtgagtatagaaagctctatgccctttacccaggaaaaatatgcgtaaacgacactcctgggcactgcagacaatgtatatcactaaaaataaataagataaatagaaaagtgtctgctacaaagggctttagaaaaaaaagctacaaagaatctattggttaagaagcttcataaatgctttttaaaagaagagagtctttttcaagaagagggctttcacatattatacagccttttatgttgaatttcacaaaggattttatacacttttcatagggaaaatcactttctttaaagggaaggtgatttttttctccctttataccgtaatttattccagacatatgtatgtgcatatcattaagagcagcctccccaagtttttcacctacataagaaagaactttatcaaaatcttctatggttttaaaaagaccattatatcttgcgtgaaggtggcaaaaatctatacagagcttgcaggtcttaacttctgaagctagtgctacattttcttctaaagatccaaattgagtaggtttacccgtagtttcaagcctatagtcaacacctatatcgggcagcttttttagattttcctttatggtattaaaggtttcttcctttgaatcttttaaataaaaaccgggatgaaatattaagctttttccttctacactttttaaggcatcagcaccagacacaattctttttagtgaggcttcttgtttttcattttcctctgcatttaaatttataaagtaagaaccatgagcagataaatagaaatccttctcatgttttttatttaaaataccttctctatttttatttgttatattaacgcttctaacaaatggaagttccatggcatcaagtcctatgctttttaaatagtctattcctgtttcatatgtaaacttttcatttccgcttccattaggtattcctgaaattccaaataataatttatccaaaatagtcttcctttcatgtagaaaatttttgtgtatattagtaataacagatgacaaagtttaaaatgccatctgttatcttagaaatctaaattaatctattaaatattatatcaaagttcaacctttacttccacagcagtatttatttataaagctttccaatattctagcatggacttgttcatctgatataattttttcaataacagcatttacttttggatcgcttatctcacaaattaaatctttatagcctcgtatagcagctttttcacctgctaaatcggcagttaatttttcgcatagataatcttccttacaaggtggacattctagcttgtatacattctcgccgtatgctagttgaccagtggaaaaccaatctctattgctgttaaagaaagcaggtcttccgcctaatttaactatcaaggaagctagtgcatcaagatgtctcatttctactattgctatatttaagagggtatctgaaacttctttgttgaagatagtttcatggtgatagatatattgtgttattgcttgaagttcacttccgccgcttgaagcatatgaatcgtataaaagatttgcatatctaatattgcatttacatacttctattggtggaaatggtatttttgactcacatgaaattttagtacttggttttttactttttttatcgtagcaatctgaagactttttatttctcttatcatagcagttttcatgagacttactttcaaagtgctcgtctatttcatcatagtagtccattggatattcatcatatgaattttcctctattttatcatagtaatccatctttttatctctcctataatttagtttgaatttaaattctatataaattgttatgctgtaataaatttgtattcaatatatcttattaataatacttttaaaatgtcacatgataaattctactaaatgctatttaatatgtatctataatacatattaagacagattagcaagttatctaccaaaaataaagagggatagtttaagttttgtcatactgctacgataaataaattgtaatataattctactaatgagcggggggtgaattgagtagtggtaataaatcattctggtgttttgcagaaactggttaatagggactattctataagcactcagaggtctaagaatgctgataaaatgtcatctggttcaataatgaataaagcttctgatgattgttctggtttggctatatataagaacattcacatgcgtataagtggattagaaatggctaataggaatacacaggacggtatatctattatgcaaaccatagatggaggacttcaggataccgaaaagcagcttggtagaataaaagagcttgcggttaggtctttaaatggaaatcttacagatacggatagaaagcaaattcagcttgaaataaaccagataaaaaatggaattgacagtacagctaaggattctgagtttaatggaataaagatattaggacaggatgcaagcattaagataaaggtaatggacgatccagatgtgaattttaagttggatttatatgactgttcaacacaggctcttggaatatctaatctggatttgaccagcatagattcttcaaatgatgctttaggacaagttaattctgcatttgataagataaacggatatcttgttaaaaatggagcaggacaaaataatcttcagcaaataagtgaaacactatcaaatatgtcatataattttaatgcaacagaaagcaatataaatgatactgaaatggcaagtggacaaatggagcaaacaagactttcaatgcttcaaaatgctactagtgctattttttctcaagttacagatataagtaaagaatctttaagtgtactaggataacaatagaatcatttcaaaatgacatagttattttgaaatgattcctttttataatgatattaaaaactaaattattttataagtttagttccatctttatcttgggatattaaaccttttttcattaagcctcccaatgcatttttaaaataatttttgctttcatgaaatactctttttatatcttcaggagagcttttatcgttataaggcataaatccattgtttttcttcaaatattcatagattttgtgctctaattctactctttcatctttaggatattttcttgttgttaggccaattctaccatcttcaaactttctcttaaatcttaaattgtttaaaacatcaccttgagatactttaataaagcactcatttttaagtattacgccttgatatttattttctatggctaccattatagttccgttgctttgaaaaccgtatacagttccagaaagctcgtttttaagtaaatcctcatcttctaaaacttctagtattttatctatataggttgtagcagcaagccttcctgttttatctaggtatacataaaataaatattttttaccaggttcgagtaagtagctttgctcctttattggaacaaataagtccctctcaagaccaaaatctaagaaagcacctattttagtgtttgatactacttttaagtaggctgtgtcaccaaccttagcatagggttctcttgttgtagctataggtcgatcctttgaatctctatatataaatacttttattgtagaacctatctctatggtatcttcttcaacatctttcattggtaaaagtatatcatcgctagtgcttccggtttcagcatcaagaaataaaccaaaatcactctttcttgcaaccttaagttcgttatattctccgattttaaccaagttataatcctccttttgtagttaatgcaaaaaaactatactttttagctaaataaagtttttcgctatattattttaacacacttttatctaatgtataaaattaaattaattattcagaaaaaacttgaaatggtagtctattacgtaggagatgtaaatgtcatgtagtatttgattgttccttctaaaggtgaagtcaataacagtaaatgttaatagtttgaatatagtcataaacttgacaagtgggcttctaaaatggtacaacaggaatattagggatcatttagtaaaaaaagaagcaaggctacaaagtttgtgactgtttttgtagatggttctattaaaatggctgaagggatgtgttagttcagcgtatattacatagaaaaagcagtttatactttgtgtgcaaatcctcaagtaagagcacacatggaaagtttgggcaagcagattcgtagtggaaatgcctagaaataggacaaacagctgtggtggctttaagagtacttggggtcccaaagatataggtgctatggatagtaaggcaagcaaggtggatagttcactgaagaaaatagaatataagatgcttgattactgaagtggttcaaagagattatgaggacaagccaactgaaagctttatagattaaggtctggcaaaagccgttgatactccagtagactccacaaaaaagagcctgaaaatccttatgatccattttataaactgaaacataaaggaaaggaagttaaaaaatgatggaagaaaaaagttttttaccacttggaagtattgtaattctcaaaggtgcaatcaaaaaattgatgattgtcagcagagcaaatgtagtcaataacaattattttgattatggtgcaatactttatcctgaagggatgattgatgaaaatgtagcttactttaatggcaaagacatcttgaaggtggtttcagaagcatacacagatgatgatgatgccttgatggttgagcaactatgtcaagctaaagaagagtacttagcgtctagcgtagaaattaaagaaaatgtttcagcaccagaaacagccgcagcagaggcaggaaactttgatgatgatccttttgcagctgtgagagatatggaggatgacgatgagtgattcagaaaaatataataaagtcatacgcctaaagggttatgttaatcgactttcggatttgttagatgatacttatggcttggactttacacaattcaaaacagctggaacaacgaattggtccggaaaagtgaaaaaaagtcagtttgacgatgaatataaaaaagccagtgacgaattagcaaggacagcaccagaaattgaagaagcgatttcaacatgtaagagtaagatgtacagtttagcttggtccattgatgataaatggatgaagacaaaagcccttgccattacagctttttaggagggggaaggatatgggaaacgaggtatcagttaatactaacaaacataaaactcaagttatgaaggttggaaaaattgcatcgaaggtagcaggagttagaaatggtttagacaacaaatatgatcaccttaaagtcgataaaatacataccattttcaaaatttacgatgatctcacaaaattggtgagttcttatggagaaatggcagcacatgacttaaaggagtttcgccaattgggtgtcaatattgagaaaacggatgctgagggggcaaaacgatgagtaatagtgaactatattatgaggaactgactgacctttccgttaggattgcgctaggaattaaaaataggacagagccccttgatgaattgagtcaggcaatgactcaattaagccaaactaatgccataaaaggcaacgcagctaatgcaatgaaagcctatattaacgaagtacatatgaccttgattcaaacactagagctgctccttaacaattatgaaatggcacttggaaagtatgttaaaggttatttagaagtggatagtgacgagagtttcaagctcattaaagaggattttgatgcccataagaataatctaagctcacaccaatctgattttacctctattggcaataagttaaaagctatttcagatgaagcggaggatattatatcgctaagaggagcaggcagcaaacgtctcttcaatgttgctaaagatatgggcaccatgaaagaaatagtaagtaatctcaataataaatggaatgattacgaacagtcagacccaggcttcaatcaagttcaagatttaattgcacagacaacatctctattgaagagtacgctttcggttccacgtggatattcttatagtccgggaagctttagcaagcttataagtaaggattttgtgaatgcttttgaggttaatgcaaattatgcgcaaaatcccgataatcagaaagcttttaaggctaattggaatagtattagtaagaactatactactgaccagaaacgaatggctgaagaagcaaaagaggaagctcaaaaagatggacgcatcggactaatttgggatgctattgcaagttgctgcaggaacagtgcttgttgtgacaggagttggagcgggttttggtgttgttctcattgcaggtggtattaatagtgctatcaatcatgcctcaatggcaacaactggcaatagttttaacataatgggaaacttgacaaatggggctttacaatggtataacaaaaacattggagagcctttagtgaaaacaggaaatcccgtcgcaaagtttgtagctggtttaggcgatagtgctattcaaacggctggaggagtgtggcagtttagtgtatatgatacgggaaaagcagtttatactttggcaacaaatcctgaagcacaagcacaagttggtaaaagtattggaaactggtggaatcagattcgtagtggaaatgcctatgttataggacaaacaactggagttgtcgcaagtgtacttgttgctccaggagatataggtgctgcggctggtaaggcaagcaaggcggaaagtttacttggtaaagtaggtacattctcaaaatccgttgctgtttcaagtgcaaaaagtgctaagaatataattaatttaccaggaagaacgatcgataatcttaggagtaagtttacagatttgagtacagcacttggtcaaggtaatggtatcagatatgcgtttcaggctgcaggcgatgatggctcaatttttagcaaaataaatgaggaaaatatagaacatgtagatgcagataaaatatgtgaagataggtatgcacaatggattaaaggtaagatgtctgaggggacggctgatgctaataagataaaaattcagaaacctaaggcgtattctaatcccaaaatgagacctaaatatgggaaaaatcaagtaaaagatgtatggaatagtgcaaaggatattgatggtaaggtttatgacccaaatactggagaagaattatcctgggacacaagtaaatctagagctggtcaatgggatatgggacatacaccagaaaataaatatagcgagtggcataaaaaatatatagatggagaaattacaaagaaggaatttttagaatggtatagaaatcctaataattatagaccagaaagcccatcagcaaatagaagccataaatatgaataaagaggagatgataaaatgccaacaaaaaaagcagatatttatactttagccaaattcggagatttaggtgcttttaaagaatcttttaaaattgaaaatataaatgataaaagtgaatcaggttcaggattattgcattatgcaatttcaggattaaaatttgatatagcaatgtttttgatagaaaatgggattgatgtaaatattactaacgaagttggacaaactgcattacattatatatgtaattatcccaatatagatgtagctaaatgtattttaaaacatggaggggacataaatataagagataagtattataataatgcattatggactgcggtttttaattgtaaaggtagatactatgatatggtagaattatttatggagtatagtccagatgtagaaactaaaaataatgctggaaggtcaccattagattttgctatccaagtaggaaatgaaaagttaataaaaatgctaagaaaaaaagaatagcattaataatttaaagtggatataaaatgaagaagtaattaactgcataaaaataataaataacagaatatagttaaaacaatagaatgaaagaaatgtaataatgcataacttaaataatgcagtgaaagaagttaaaaagattaatgtttcagtgattggggcattaatctttttttatattaggagatatttatagaatctaagataactagggataaaaagcaccgtaagctgaaagctaaggaaattctaggttcaataatttcacttaaaagttaacgaaattatggacataataataagttaactgagtagaatgactagagaattggaactaggcactaggaaattgtaacgagtggtagggtgcatatgactgataagaagatataagattgaaataaatcaagtgataaatatttcaataatagcaatctaaaaatataatatatcaatattaaaaagcagtggaaatgcctatgctataggacaaacaactggagttgtcgcaagtgtacttgttgctccaggagatataggtgccgcggctggtaaggcaagcaaggcggaaagtttacttggtaaagtaggtacattttcgaaatccatcgctgtttcaagtgtagaaaatgctaagaatattgctactttaccatggagaaccgttgataaccttggtagtaaggttgcagatttgcgtacagtacttagtgaaggtaaaggtgctataggtgatttaacaaagtctgtcgttgtttcaagtgcaaaaagtgctaagaatataattaatttacaaggaagaacacttgatgatgttaaaaaagaagcaggatttgtaaatggaaagctgttaccagcgtcaggagaagcggtaaaaagttttggcaaggtattaaaaaatacaggaaaagatttaaaaggattaactcgtcaagtagaagttgaaatgcccggtgtaggtcgagttagtgtaggacctaatatagagtttagtgaagtagtgaagaattttaaaaatggagttggagatattaaggataactttgtgaaggccgttaagagtggagataagggggcagttaaagctgagcaatctatatcaaaaatagatgaagttgaagtaaagtttaattataagactaaatatgacgaggatgaatttgcaagacaattagctgaccaagaagctggcatgaacaaattgacagttgatgagtatttaaagaatagagaaagatatattgaagaaggtagagcaatagaaggaaatatggctcagcaggctgcaagagataaagccttagctgataaagttgatgaactaagaagctctggaatgtcattaaaagaagcagaaacacaagcacaaaattggttagatacacaagcggcattgcataatccagaccaaattgcaggaggaaatccattgaatattggtggaatgggtgataaaggaatcaactcatccattggggctcaatggaaatatagaatagatgctgttgatgagcaaattcaatcaatggctaaaaatatgactgatgctgaaaggaaaagtaattacttaaatgtaaaattaacatattaggaggaaaaaaatgaataattatttatttaaaaagtttgatataaatattagagctaatgatgatactattaaaaagtatagagaaaaattaccaacagaattattatcagtttggactgaatatggatttggaagcatcttagatggatatttaaaagtaattaatccagatgaatatagcccaattatagaaatgtcttattttagagcagatgtatcaatacctatttttataacggcttttggagatattattacatgggaagaaaataaatatatagggataattagatataaaaaagggaattttcagataatatcatcggggtttaaatacttctttagcgatttacaagatgattatttcatagaaaaatatttagaaatagataaatataatgaggctataaagaatctaggattaattcaatatgatgaatgctttggatatgtacctttactaggtcttggcggcagtgaaaaagtagaaaacttaaaaaaagtaaagataaaagagcatatagaattaattacacaaatggtaggtaaaattgaataataaaaattagcctatttacagatgagcacttattacaaaactataaaaatataaatgcataaaacttagctcataaaatattgttggaagtataatagtttaataaatttattcactgcataatctaaataatgcagtgaaaagatgaaatgaatcagcttaagtcaagtaggctggttcatttttttagcagttaatatatgctgtaaatacataattcaaaagaactatattcaaaagcgacgataacacatcagaaaacagagattttaaagactgtgaacaagagtggcattaaaattttaaaagtgttaaataaaggctaaagatactgatttaatagaaattgataggtaattaaaatctttttaacagttgtacaagtataagcatatgataaaggacttcctggttaattataacagacatctttaggagccagtaaaacgaacatagaagatatgtgtagcctgataagctaggaagatctggattcgataattctacttaaaagttaatgaaattgggaacatataactgataagaagatataagattgaaataaataataaatatattccaatataaaatataataaatacagataaagaaataataactgatataattataaataatcaattgatgaatacatataattgttataggacaaacaactggagttgcccttagtgtgcttgtcgctccaggagatataggtgctgcggctggtaaggcaagtaaggcggaaagtttacttggtaaagtaggtacattctcgaaatccatcgctgtttcaagtgtagaaaatgctaagaatatagctactttaccatggagaaccgttgataacattggtagtaaagttgcagatttgcgtacagtacttagtgaaggtaagggcgctataggtgatttaacaaaatccgttgttgtttcaagtgcaaaaagtgctaagaatataattaatttaccaggaagaacaattgatgatgttaaaaaagcagcaggatttgtaaatggaaagctgctaccagcgtcaggagaagcggtaaaaagttttggcaaggtattaaaaaatacaggaaaagatttaaaaggattaactcgtcaagtagaagttgaaatgcccggtgtaggtcgagttagtgtaggacctaatatagagtttagtgaagtagtgaatgattttaaaaatgaagttggagatattaaggataactttgtaaaggcggttaagagtggagagaataatgctgataccataggagacttatctaaatttaattttggaaattacttaaagaaaaagagaggaaatccgccatcaggaatgagtaagcctcatgcgcatcatgttgctgtaaaaggtaatttttctaatcgtaaaaaaataattcaaacatatgctaagtattctagcgaagtattaaaatcggttgggattgacccttattatggtattgaaaatatacactgggcacctaatgaaggacattcgaatagatatattaaggcaattgccaaagaattttatgaagtaaagaaattaggtggtaataaggatgattttgtaaataaaatattagatattgtagataaattaagaaagggaaaatttccgcctcaatagaaaggagatattatgaataatttaagttggagtgatattaaacgcagcacttttaatgcaattaaaaaaggtgatttaaaattattagctaatatgatagataagtatcctaaagtgattgatgcttataattcaagtggatattcgcttttgcatgtagccgcagagcaagataatgtagaagttcttgagtatttatacaataataaaattgatgtaaatattacaaggaagaacgatgatggatgtgtgacacctatacatggagcagttgataagaatttgattggaaatgttgaatggttaattgctcatggagctaaaattgatacaggaaatggtatacatgctacacctttaataggagctgctttcaatggaaatttagaaatggtaaaattgttactaaaaaatggtgcagatataaacgcgttctatgatattggagaaggaataaataaaacaaggattacaccattaattgcagctgagatggaaggacatacagagacttgtgaatatttgtgcaaaaatggcgcaagaaaacttgatgcaaaaaaatatgagttaacgcagataaaaaatcaacatgatgagattttacaatacttgcaaagatactttggaaatgttaataaaactctttctgaagttatacctgcaagcaatgtttccgtaaacttaaatataatgagaaatactgaaaatgataagttcataaccattgttacaactggtatgagtgactgtcccatggatgattctgatgaggcatttgaggaaagatttgctgaattaataataaagttacctaaggattggttgatagataaaaataatattaaagatgtaaataattattggcctttgggatggattagaagaatagctcatatccctcatttatatgatgggtggattggtaaagatatcattattccaaatggagaacctcctcagccttttgcaccgaatacaaaattatcatgtataatgatatgtcagccagatgaaaaggaattgcatagattcacaacttccaagggaaatataattaatctatatacattgataccaatttataaagaagaaagaaatatggcattaataaaagggtgtaagtatttaagaaaaaggatggaagataggggcattgatgaaatcttgaatataacaagagaaaatgttggattaagtgctgatgaacaatagataaatgtggtatgtgttgaataaataatatctattagatttttatataacagaaatgcaagtaagatggatgaaatattcaagtgacaagaaataaatccacatgagatattgggagattttccgtcaggaatcgcatttgcaagaatagttagattaggtgggaaggcactatcaaaattatggtgctattatgtcaagaaaaagaacaaattaaaatggaaaagctgaaaagtcttacaggtttcaattgcgtttagagcgaatagcaagttattgaaatctctaagtttttaatttaaacttttataaccttaattcattatattaagaaatagttaatctactaatctgaggcataatggagaataatccaatatatatttttggacagccagaacgcaaggaatagcaatagaagatatactatgcacagcagtaaaagatatagaagaccttgaagaattatgtcagcagaagtatggttaagatatatagaattctttaatataaagtcgaaaatcttaaaaggtattggttttaagattttttgtagtgttaatggataaaaatcatccttatccatggttattttaagtgtagaaaatgctaagaatattgctactttaccatggagaaccgttgataaccttggtagtaaagttgcatatttgcgtacagtacttagtgaaggtaagggtgctataggtgatttaacaaaatccgttgttgtttcaagtgcaaaaagtgctaagaatatactcactaaagtaaaaggaacagtaagtgactttgaggctgcttcagctgcattcgcaaaagcttttggaaaaacttacgtggaagaaagcggtaagtatgcaaacactgttttttctgcatctggtgcaacggctgctagtgcaaaaacttcttttaaagcaattagttcaggagtgaaaggagctaaaaatgctctccgagaggttaaggctggaacagatattccacctgcttttaagcaaactgaatttgctagttcatacgaatcgagaattcatcaaacacctggagaagaaaatttaaaagttgtttttgaaggacctaggggcgaatcactatgtactcttaagccaccaccagatcctgaattaagcaaaatattagatggagctggtattgatggtattgaatatagaaatggagttcctgattttactccagtttcaaaagctaatatagaaattgagcatatggttggtggaaaattaaaaatgggaacaaaagcaagagagataaattttgttcaggcagataaaaagttagcagagcaacttaataattcaccagaattagcacggaaatttggaatggagtcaggtgaaattagtgtaaaggatataagaaattttagaaagaaaaataaatatacatggcatgaattgaatgactgtaaaacaatacaacttgtaccatcaaaaattaataatgcatttggacatgttggcggtgtaggagaaataaatgctggggcatttgaaccagagggatttgctaataaataaaaaaggagattttaaaagtgagaataaatgattcgatttttggggaattagaatatgattatatttggactaaggatgtaattattgattttttaggtaaagaaacagaaatatctcttatggttaacggggatgaggatggtgtatttgaagaagagcagtatattgcatatactttattaatgaaaaagtggagcaatttacaagaggaaattttagaagcaattttaaattattataagtcaaaaagacatgagttaggttatgatattgaaaattatgaaaaatatcctttgattgaaaatatagaaaacttacttaaaaatataaccttagttggaattgttattccatattcaggagcttatgatgggagagagtgtggggtaacttttgattgtacatgggataatgaaaatggtataggagtttgtcttgttgatgaaaaagtaatagaagtaggttatcaggatgttgtaatgtaaaataacttattaatatcaattcataatacagaatagattaattgcataaaataatgatataatcaaatttaataatgcagtgaaagaagttaaaaaggttaatgtttcataatcggagcgttaatcttttttcatacagtgaaatatttataaaagctaaaataacatatgttataagacaaacaactggagttgcccttagtgtacttgttgctccaggagatataggtgctgcggctggtaaggcaagcaaggcggaaagtttacttggtaaagtaggtacattctcgaaatccattgctgtttcaagtgtagaaaatgcgaagagtatagctactttaccatggagaaccgttgataaccttggtagtaaagttgcagatttgcgtacagtatttagtgaaggtaagggtgctataggtgatttaacaaaatccgttgttgtttcaagtgcaaaaaatgttaagagtgtattgactaaagtaaaaggcacattaagtgacattgggactgcttcagctgcattcgcaaaagcttttggaaaaacttacgtagaagaaagcggtaagtatgcaaacatcgttttgggtggatttggtgcagcgggagctggtgtagaagttacctataaagcagcaaaagaagggttaaaagaagctaaaagtgtttctcgaaaggttaaaattggacaaagtggttttggtgaggttgcggctgatgctgaaaaatcgttatcaagaatagataaagatacattgatggaggtagagtgatagaaggaaatatggcacaataggccgcaagaaaagaagcgcttgcaaataaaatagatgaattacttgattcaggtatgtcatatcaagaagttgaaacacaggctaataaatggatggagtctcaagcagcacttcataatccgaaccaaattgcaggaggaaatccattaaatattattgctggaatgggtaataagggaatcagttcatgtattggcttacagtggaaatataggatagatgctgttgatgggcagattcaagcaatggctaaaaatatgactgatgctgaaaggaaaagtacttacttgaatgtaagattaatatattaggaggaaaagcaatgaatgatgagctatttaaagaatataataataaagttgatgtcaaagtaattgataaatataaagaaattataccaatataattaatatatgtctgggagaaatatggatttggttctatattaaatggcaatttaaagataattaatccagaggagtatcaagaggttgtagatatgtcatattttagagcaaatgtggctattccgataatggtaactggttttggagatataattacatgggaaaagaatgaatatgtaagtatcataaaatataagaatgggacatttgatattatattaaaaggatttaaacatttttttaattgtttaaaagatgaatatgttacagaaaaatatttagaattagataagtataataaagcggtttctaaattgggagaattaaaatataatgagtgctttggatatgtgcctttattaggtttaggtggcagtgaaaaagttgaaaatttaaaaaaagtaaaaataaaagagcatatagaattaattacacaaatggtaggtaaaattgaataataaaacttagctcataaggtattgttgaaagtataatagtattcactgcataatctaaatcatgcagtgagaagatgaaattgcaccagctcaatttaatcaagctagtgcattattttttagcagttaatatatactccaaatacatcattaaaaatcgaagataatatcagactgtaaacaaataaaataagtgtttagttcctactcgattgattaaatattctatcagcatatggaaaaggctttaatgcccttggaagaattccttgaacgtaggcaataagaactccgtaatttactataggaatttgtttttttactgaactttctattctgtgaagcattgaacgtctgtttagcatgcagccagcacaatgaactataagtgcataatcctctatatttggaggaaatgaaaagccacttgaaaaatcaaattctagttttttaccagttttttgtctaagccatcttggtatttttactttacctatatcatcagattgacggtggtgggtgcaggcttctgctattaaaattttatcaccatcttttaaatcttcaattgcccttgcaccacgagcaagttctattaaatctcctttatgtcttgccataagtatagaaaatgaggtcatcaatatgtccttaggtgtgtctgctgctacctttaaaaatacttgagaatctgttattactattttaggtttttttctaaggctgtctaaggtttctctaagttcaaattcctttgtcaccatagcaatagcgtcactttcaagtatatctcttatagtttgctgctgaggaagtattaatcttccctttggagcagctttgtctattggagtaactaaaactgctatgtcaccaggagaaagtaaatcaccaacaatcttaaatttatcatcattttctggtgctaagcgtattaattcatcttttaaattatttatgcctttattattgagagctgaaattggtactataggtattttaaattgagaagtataatcctctagcttatagtcctttttatctattttatttaaaactcctattagtggaattttcttttcaagcagtaatgagtaaatatttttatcatattctgttattccactttcaacatcaaaaactaaaattgctacatcagtttttgataaaacctcgagagtttttccacgtctaagctcacctaaatcacttatgtcatcaagaccagcagtatctataagcataactggtccaagagggagcagttccattgctttgtaaacaggatcagttgttgtaccttttacatttgaaacaagagctatttcttgagaagtaagagcatttattacactggattttccaacattagtttttccaaaaagtgcaatgtgaagtctttcacctttgggtgttgagttaagttcattcattaaaatcacctcgtctatagtcctggtatgccaggttttgtaatctcataaggattaagtattttatctatttcttcttttgttaaaattttttctaaaaggagtaattcccgtatggattttttttcttttagagctttttttgctataatagatgctttatcataacctatataatgaactaaggctgtaacgagtgctgtagaagcttctaaattctcaagacatttttcttcattaatttttattgaatctatgcatttttccctgaacacattaactgcattagtaagtatttcaagagattctaaaaggctttcagcaattagaggagaaaaagcatttaattgaagctgtccaaaagatgaggcgagggagatagcagtatcgtttgccataaccttcatagaagtttgagctgtcatttcacatataacagggtttacttttcctggcataattgatgaaccagcttgaacctcttcaacaataaattctcctataccacctacagggccgctatttaaaagtcttatgtcatttgaaatttttataagattaacagcgcaggattttaaaagacctgacacctctacaaatacatccatgttttgtgttacatccattgggtaatcacttcttgcaagcccgagtcctgttaaatcttgaagtatgtcagtaacagtgaaaatataatcataggaagcatttattccagttcctatggcatttcctccaatatttatctcacgaagtctctcttcaaccttatatattcgccatctatccctagcaaaggcttttgcataagctccaaagccctgacctaccatcataggtaaggcatccataagttctgtccttccaagcataagtatatctgaaaaatcattttcttttatttgaaaggattcttgaagtttacttaaagcatcagataaaggccttagaagttttatagctgcaattctaagagcagttgggtatacatcattggttgactgagacatattaacatcttcaattgggtggattatagagtagtcaccctttgagccattaagtaattcaatagctctgtttgcaatgacttcatttacattcatgttggttgaggttccagcaccgccttgaagagaatttgtaatgaactcatcgtcaaattttccacttaatatgtcatcacaagcgcttattatagcatctgctttttcatctttaagttccttgagttttttatgagctaaagcagccgctttttttacaattaccactgcatatattaaatttaaatttacttttttattgcttatattaaagttttcaaaggctcttagagagtttattccgtagtaggactctttaggtaagtttttttctccaagtaagtctttttctattctaaaatcagaaggcaaatcaaacactcctttcttccttcacattttaacaaacttgattaatataaacaactaggatgaataatttttatataaaaggagatgtagtttaaagttatcataaaataacaattctactgatagtataaatagtaatagaatttatacaaaggtaagataattaataatgtaaaggtattaattggaaaagatagtaaagcaaatgattttaaataatgatacactaaatgtaattaaaatttcaaaagtataggtattttttaatataaattaggataagtggagggaattatgctgtcaataattatccctgtatataatgagaaaggtaatatattagagcttacgtcaaggataaagagtgctttgaaaaataatgaatatgagattgtttttgttgatgatagtacggatgaaacacccaaaattatagaaagtctagctttaaagtataataatataaggcttaagcatagaaaaggtaaaaaagggctttcctctgctgtaattgatggttttaaacttgctagaggagacgtgctttctgttatggatggagatttgcagcatccacctgaaatgcttgaaagtatgctttttcaaatgaagaaggatacagatatcgttatttgcagcaggtttgtgcttggaggtaaggaggaaggacttaatatatttagaaaatttgcctcatttatagcaagattaataggaaaaatttttttaaagccactaagaaaaatatcagatccaacagctggattttttatgcttaaaagaaaggttataaaaaatagagatttaagagctataggatggaaaatactaatagagatacttgtaatgggagattataaaagggttgtagagcttccgtattcctttaaaaggaggaaacacgaaaaatcaaagttcacaatttctgtgcaaggacaatatttaaagcaaatagttagtttatttataagaagtaagaaatataatattaagtagcttgattggggaaaatgtaaatattataatgataagtacacaaaaatagatgcaggaggaaagtgaatgaaatttgaaattggcaacatttatagcgggtttaaatttgaaagtgagactgtaatagatgagataaatagtaaaggtagggtatttaaacatataaaaagtggagctgttcttgtaaatttaaaaaataaggatgacaacaaagttttttctataacctttaagactcttccccacgatagtacgggagtagcgcatatattagagcattctgttttatgtggttctagaaagtttaaggtaaaggagccttttatagaaatactaaaaggttcacttaacacatatttaaatgctgcaacttatgctgacaaaacaatgtatcctgttgcaagtagaaataaaaaagactttatgaatcttatggatgtatacttggatgctgttttttatcctgatatatataatactcctgaaattataatgcaggaaggatggcattatgatataaaggatgaagaagatgaaatagagtacaatggtgttgtttacaatgaaatgaaaggagcctactcatcgccaatttccttgctatcaagaagcatggacgaggagctttttaaagggagtgtttatggagtagattctggtggaaaagtagaaaatatagtggatttatcttatgaagaggcactaagcttccatgaaaaatactatcatccatctaacagcataatatatgtatatggagacattgatatagaagaagttttagagtttattaatgacaattatttaaaggatttcaataaaaaaaatatagatgcagatataaaggtaaatggagcctttagtaaagttcatgagaaggaattagaatattctatttcagagggagaaagcgaaaatgacaaaacttattttggcatgagttttgtaacaggagacgctttagatactgaactttcaatgggcttagagcttttggagagtattttacttgaggcttcatcatcaccacttaggagagctattgtagaagaaaatataggaaaagatgtttttggagtttttgatagttcaatattaaaaaataccttttcaataattctaaaggattctaatttagaggataaagataaatttaaagaagtagttaaaaatacacttaaagagcttgttaaaaatggaatagataagaagcttataaatggcataataaatgcaaaagagtttgctcttagagaaagtgattttgattcttatcctgcggggcttgtttacaatgaaaagatattggaaagcatgctttatggaggagatccctttataaatttaagatttaatgatgtaataaaaaatattagaaagtatgcagagtcgaattattttgaaaatttaatagaaaagtatattttaaataataactatggagtatttataactgtaaaacctaagaaaaatcttgaagaggaaagagaagaaaagttaagagaaaagcttagaaaatttaagaatggtctttctaaggatgatcttaagaaactcatagctagtaatagaagcttagaattaaggcaggatactcctgatagtgaagagaaccttgaatcaatccctcttatagctataggtgatgtaaaaagggatatagagacaattgagcataaaataatagatgaaaacaatgcaaaaattatatggtgtccactaaacactagaggtattcagtatgtaagtatatactttgaaggaaaatcagtacctcagaatatgattccttatgcttctttattatcctctgttataggaaaggttaatacagaaaaatataactttaaagagttgtctaatgaagctatggaaaacctgggcggcatggattttggcttagatgtatacagtaggcctcaaaattacgaggattatgcacctaaatttgctgtaagggctaagagcttaagagaaaagcttccaaagatgtttgaaataatggaggaaataataaatcacagcatttatgatgattacaagaggcttaaggaaataatagacgaaataaaatctaggatggagatggcaataagaggttcaggaagcagaatggcatctgtaagagttgggtcttatgtatctagtgcgtataaatacttagatactataacaggaattgatttttataaatttatagtagatataagcagtaattttgaagagaaaaaagaggaagtagcagcaaatctaaaggctgcatcggattatatattcaaaagggataatttaattgcagcatattgtgcagaagaagaggattatgaaacttttagtaagctgtttaatgattttaccttaaaattaaagaataacaattttaaattgaatgattataaatttgagcttaaaaagttaaatgaagcatttatgatgtctacaaaggttcagtatgtagctaagggttttaattttagaaagttcaatttcaagcataatggagcgcttattgtgcttagaaccatagcaaattatgattacctttggaatagtgtaagagtaaaaggaggggcatatggagcttctatgtcattatcgaggaatggacatttagcatttgcttcatatagagatcctaatttacttgagacattaaaggcttatgaggaaatggtatcctttgtaaaagattttaatgttaatagtagagaaatggataaatacattttaggtaccataagtggtattgatatgcctttaagtaattattcaaagtgtgaaaaggtgacagcacagtatttaacgggaatagatgacgaatatatgagaaaagagcgtcttgaaatattagattgttcagtggaggatataaaggactcctatgacattttgaaaaagcttaacgaagaaaattgtatatgtgtttttggaagtgaagaaaagataaaagagaacaaagaattatttgataacgtagtggatatattcggagaatagaaaaacgagaatgtgaagttttagaataaattttgcattctctctttttagtttgttacattacgaacaattaacttgattttatattacaaacattacaattaatgctttaacttttttgaaaaatgtattataataattttgtaaatgacgaatgaaattatgaatattgtttgtaatgttcgtaaaaatgtttaaggagaatgattatgaatacaaaagtaaggcgtatattcgtaaagaaaaaagcaggttttgatgttgcagcaaaagaacttttgaaggatttagtagaaaacctcggaataaaaactttaaaggatttatcaatattaaatagatacgatgtttctggcataaatgacagtgagtatgaggatgctaaagctattatattttctgaaaaaactgttgatgatgtatatgatgaaaaatttgaagtttcaagtgaagataaagtttttgctgtagaatatttgccggggcagtacgatcaaagagcggattctgcatgtcagtgcattaaaatacttacaggaaatgaagatgttttaatagcatcagcaaaagtaatcattttaaagggaaatataagcgttagtgatttagaaaaaattaaaaaatatgttatcaatccagttgattctagagaggcatctcttgataaaccggaaacattagaagtaatatatgatcttccgtatgaagttgaaaccatagagaattttataagcatgtcagaggatgagcttaaggtattcttagatagtaatggacttgcaatgagtatggaagatttaaaattttgtagggaatactttaagaatgaagaaaagagaaatcctacaataacagaaataaaggttatagatacttattggtcggatcactgtaggcatacaactttccaaacaaggcttcagaatattcagtttgaagatggaaaatatacagaagttttaaagtctgcctacaaaaattatgtggatgcaagaaaatatgtttatggaaataaagaaaaagaagtatgtcttatggacattgcagttattggaatgaaggaattaaagaaaaagggctttttaaatgatttagatgagtcagatgaaataaatgcctgtagtatagtagttgatgcagatgtaaacggaaaagatgaaaaatggcttgtaatgtttaaaaatgaaactcataatcatcctactgaaattgagccttttggaggagctgcaacctgtcttggaggagctataagagatccactttcaggaagagcctatgtatatcaagcaatgagagttacaggtagtggagatccaagagttagaatagaagatacaactaaaggaagacttcctcaaaagaagataacacttggagcagcaaacggctatagttcctatggaaaccaaataggacttgcaacaggacaagtttccgagtgctatgatgagggctttatagcaaagagaatggaagttggagctgtggttggagcagcacctaaggaaaacgtagttagagaagagccaaaaccatctgatgttgttattcttttaggtggaagaacaggaagagacggctgtggtggagcaacaggttcctcaaaagaacatgatgtaaattcacttcaaaactgtggtgcagaagttcaaaagggtaacgcacctacagaaagaaaacttcaaagactttttagaaataataaggtaagtacattaataaaaagatgtaatgattttggagctggtggagtttctgttgctataggtgaacttacagatggacttgacattaacttagatttagtccctaaaaagtatgagggactagatggaactgagcttgcaatttccgaatctcaagagagaatggcagttgttgttgagaaaaaagatgctgaaaagtttatagaatatgcagataaggaaaatttagaagctgtaatagtggcaaaggtaacagatacaaaaagacttaaattattctggaaaggaaatgctatagtaaatatttcaagggcatttttagatacaaatggtgttagacaaaatgttgatgtttttgtaaaggcaccaaaaaaggaagataactacttcaagactgaaaataaaaataaggacgttaaagaggaagttttagaaaccttaagggatttaaatgtatgcagtcagaagggactttcagaaagatttgacagcactataggtgcaggtactgttttaatgccttttggaggaaagaatcaaataactccagctgagggtatggcagcaaagcttccagttcttaatggagagacttcaacaggaacggtaatgacttacggttataatcctaagataggaaaatggagtcctttccatggtgcaatgtatgccgttatagaatcccttacaaagatagtgtgcatgggcggagattataaaaagactagacttacttttcaagagtattttgaaagattaaataaagagcctgaaagatggggtaaaccttttgcagcacttcttggagcacttaaggcgcaagagatatttaatactccagctataggtggaaaggacagtatgtctggtacttttatggacttaaatgttccaccaacacttgtatcctttgctgtgaatgtagttgatataaataatgtgatatcacctgaatttaaaaaggtaggcagcagtgtggttttagttaagtgtgaaagggatgaaaatgaagttcctttatttgatgaattgaagaaaaactttgatactgtacaggctttaattaaggataaaaaggtaataagtgctcaaagcgttagacacggcggactcatagctgctttaagtaaaatgtgttttggaaataaaattggttttgaaatgctcaaagaggaagaactatttactcctgattatggttctatagttttagaacttgaggagagcttagatattaaggaattatttaaagatgtaaaatacgaagttattggtaaaactatagctgatagtaaaataatcttaaataatgtttcaataagcattgatgaagctttagaggcatatactgagcctttagaaaaagttttccctactaaagtggaagcttcaaagaagattaatctagctttatatgatgaagttaaatatgaaaatataaaaagagttagtgctgtaaataaaattgcaaagccaagagtattcataccagtattcccgggaacaaactgtgagtatgattcaaaaagggcctttgaaagagcaggagctgaagttaatacccttgtatttagaaatatgaaggcaacagatattgaagaatctataaatgaaatggtagaggaaataaataaagctcagataataatgcttcctggaggcttcagtgcaggtgatgaaccggatggttctggaaagtttatagcaactgtatttagaaatgagaagattaaagaagcagtaatgaagctattaaatgcacgtgatggccttatgcttggaatatgcaacggcttccaggcacttataaaattaggacttgtgccttatggagaaataagagaaatagatgaaaactgtcctacactaacatacaacaatataggaagacatgtatctaaaattgcatatactaaaattgtttcaaataaatcaccttggttttctaatgtagaaattggagatattcatagtatacctatttctcatggagagggaagatttgctgcaagtaaagaggttgtagaagagcttataaagaatggacagatagcaacgaggtatgtagatttaaacggtaattcaagttatgaaacagaagtaaatcctaatggatcagtactttgtatagaaggaataacaagtcctgatggaagaatacttggtaagatggggcattctgagagattttctaaggggacttataagaatataattggaaatcaagaccaaaagatatttgaaagtggagtacagtattttaaataatttaagatcacaaggaagtgcatataaataaaagtatgcacttctttttctgttatatgtaaagtaaggtatatgaagtaaataattactatattattcagagtaaaaagtggtataataaattatagcattgaaatttaatggctaatattattaaaataaaaaaacttttaaaaaaactataaaaaaataactaacctatacgatactttaagtaggggtggatataattacctaaaattataagctttgattattatctaataaaattttttatttaagatagataaaaatagattgtgaaggtgatagtttggttcagaaggaaataaaagcgtttttagaacgctgtagtatgagcgataaaaaagcagattatgtatttcctaatttggctaaaatggcaaagttctattatgtgccaacctccagcagcgattttagtgaggtacaaagatttatacagcttgatgatggaaaaaaatatgctgttatatttacggatattaaattggcggaagagttttgcaagaatcacagttacaaggataatatacacgaagtttcagctgtagaaatactaaaaggaattttggctttaagaaatatagaaggtttaagcttgaattttaaagacaaatctcaacttgttcttaatagaaagcttataagactactttttagagaatatttgcttcaagaattttatataaaaggtggagcatggtgcctttttaaaaatcgaagttatgttacctatgaagtggcgaagggtattaagtctataccgatttttgccgaaaaagaagaagcacttaggtgcagaagaatatttaaagagaaagctacagtggagttcttaacgtggagagatattattgattttacttttaaaactaagcttgaatatttaatatatgctccagatgctccacatgtaacatttttaaaacacccatattttagttggctctatgagtcagcatcccttgctatgaataattaataaaatcagcacaactctctgtgctgattttattatgctataatgaatttatatagttaaatggtggaggaaagttatatgcaaagaaaaaagaaattaaaaattgttaatccagatatatatgaagagttagaagaagttctagaaggggaaattattgtagaggatgattcttacatagaattaaaaagctttgaaaatgtatccttagaaaataaacaggcaaagaaggtttcaataagtcaaagtatatttaagaatgtatcatttaataatactagctttaagggcattgatttaacagatgttatatttgaaaaatgcgatttgtccaatgctgattttacagaatcagttatatacagaactcaatttaagaattgcaaactaatggggataaatttatcagagggaaccttaaataatgtgacttttgataattgtatggctagatactctatatgtactctccttaggtgtaagaatgtactttttaaagaatgtacttttacaagtacggatttctacaaatcccagtttacaaatgttgagtttttaaattcagaattgattgaggctcaaatgcacgaaacaagccttaagggtattgatttaacaagctgtagtatagatggaattggtctcaatattgaagatttaaaaggatgtatagttggtcctgagcagttaatgtgctttgctaatcttctaggggttatacttaagtagttttttgatatttaacacaaaattaaataaaagctgaaaaggttaatgtaatatattatatagaaatcaattttactttggagcttttaatgaagttaggcaattctaagtatttattaggaattatgttaattgttattatatgtataattgtatttacaagaggcgattctgataataaaatcctagtagattcaaaaaatattgagtattatttttcacagagagataggaatagtgatgagaagttaatagaagctattgattctgctagagaaagagttgatatggcaatttatattcttcaaagacaagacattgtcaatgcggttataagcgctaaaaaaagaggagtagttgtaagaattattacagacagagatgaagcggcaacaaattacgagggaaaagagcttaaatcattgaaaagggagaagattcccattaaaataaatacacattcaggtatgatgcatatgaaggttactattttagataactcatctgttgcagcaggaagctacaattatacagatccggctacagaagaaaatgatgaagttcttgttattgtgaaaaataatataatagctgaaaaatgggaaaataaatttaataatatgtggctagatacgggtagattccgaaattattagacgaaaaaagcttccataaggtgaatagttatgggagctttatgtattttatccttatggaattatatacctgtggaatagtatatataattgatattataattatatatagttttgtgttttataaaacaattcagtattatttaaaggctataataagtggagttatattttttacctgtaaacgtttattttggcaataattaaacgtttctataagacttttaagccctcagactcaagctttaaaatatcattctttaaaacttagcctaaatttaagcaataaatacttaaaaatggaggactttattatgaaatttaaactattaaccattaatccaggttcaacttcaacaaagattgcagtatttgagaatgaaaaggaaattttatccgaaactttaaggcattcctctaaagaacttgaagcatataaaaacatttatgagcaatttgaatttagaaaagatactatacttaaggtacttaaagataagaattttaatattcaaaacatagatgctgtagtaggaagaggcggacttttaaaacctatagttggaggtacatataaggtaaatgaaaaaatgcttaaggatctaaaagctggagttcaaggagaacatgcatccaatttaggtggaataattgcaaatagtattgctgaagcatttggagtgtcagcatatatagtggatcctgtagttgtagatgaaatggaggatatagctagattttctggaatacctgaacttcctagaaaaagcatatttcacgctttaaaccaaaaagctgtggctaaaagatatgcaaaggaaagtgaaagggattacgaagatttaaatattatagttgcccacatgggtggaggagtttctgtaggagctcacaaaaatggtaaaataattgatgttaataatgcacttgatggagaaggagccttttcgccagaaagaagtggaaatttgccatcaggtgatttagttagattgtgctttagtgggaagtatactgaagatgaaattttaaagaaaataacaggtaagggaggttttgtagcttaccatgggacaaacaatgccttggatgtacaaaacgctgccttagaaggtgattacgatgccaaaatgacttataatgcaatgggatatcaagttgcaaaggatataggaagtgcagcggcagttttggatgggaaggttgactgtataatattaactggaggtatagcctacaataagcttatgactgatttcatagctaaaaaagtgtcatttatagcgcctataactatatacccaggagaagatgaaatgttagcactagcagaaggaaccttaagggttttaagtggacaagaagaagctaaaaaatataaataatataaaaagatgaactgcacttgaatttaaaggtgcagtttattttttactgtgtacattaagttataatatggtatataattataattaaataaattggttaaggagagaataaatggactatataattgttgcagtagttgctgctattatttttgtattagctatcctaagtactataggaaagcaaaaaagacaaattcaagatttgaaaaagaaagtgggactacttgaaaagcatataggagttggtgaacaaatttatggtgaagaaaaaatatgcttaaataaagataccacatctaataacaacgatttaattgatgtagatactgaaataagggagcttgttaggaagggaaaaaaaattgaagcaataaaaaggtatagaatacttacaaaggttggacttaaagaagcaaaggattatattgattctttggatatatattcataggtagttaataaggttaaggatagggattcctttgccttattttatttttatgaataacttagggtatatataatattttataggaatagaaatatagagtattataattaaggtaggggatataatgtcaagattaaagcaagaagatttttattatggctcggtactatcaaaaatattgaataatccaaatgaaagggttaattttgctttaataagtggtaataaggacagaagaatatatgatttagaaattggtggtaaaccatttcagttatttattaaataccgtaccaataaaattactacaaaacatgataattacagcacttgggaatttaatataactaaaaatgacagaaaagagataagaagctgtatgcacaatatgagcagtcctttattggcatttttatgcggattaccaagctttttaggaagtgaaattgcacttttaactaaagcggatatggataagactgatattgttaataaatcctctatcacgattagtcgtaaaaaaaatgaacatgagtttagcatatatatggataggaataaagataatttatttaaaataaggactgaaagattccatgagttatttggtaaagatacttaaaatttaattgtaattttaagtataaaaaaattgtaatttaaaaccctattatagggaggagataaaattggatagagaaagagtgaaagaaatactggcatctaaaggagttatagaggtaagttataaaaatgatccagtttggcttgaggctataagcacagatagggatggaaaaatacaagttaagtctttatctacaaataagcatttcaatgtggacattaaagacttaaaggagtagtgttataaaacataattaattaagggaagtcaagatggcttcccttaaatattatattttataatgtaaagaaactaaaaagttttaatttttttttagtcttatatttactggaccgatgtgccaaatttcttttgcgtaattttttattgtattatcacttgaaaagtcccccgaatgtgcaatattaattgcagacatttcaagccatttacttttatcactataaagagaatttattttatcttgagcctctacgtaatcactaaaatcctttaatacaaagaattcatcattgttagctagtaggtacttatatatatcctcaaattctgattttggaacacctagagaaccatttattagaccatcgactattctttttagtctagcatcgctgttataaaaatcaacagctctatagtttttatttttttcatattcaattacttcatcttttttcatgccgaatattactatattgtcatctccaaccttttcatgaatctcaacatttgcaccatctaaggtagctattgttattgctccattcatcataaacttcatgtttccagttccagaggcttcttttgtggtagttgaaatctgttcgcttacgtcagcacatggtattatcttttctgcaagggaaacggagtaattttctaaaaataaaaccttaagcttttcatttactgagctgtcattgtttataatatcagctactgtatttattagttttatggtacgcttagctaggtaatatcctggagctgcctttgctccgaagaaaaaagttcttggaactatattaagattaggattttctttcagtttgtaatataaatttaatatattaaacacatttaaaagctgccttttataagcatggagtcttttaacctgaacatcaaatattgaatttggatctactgaaatattgtattttctttgtatcatttctgtaaatttaagcttgtttttttgcttaatatcatgaagcttctctttaaagctttcatcctttgcaaatttaagtaaatctatgagtctttctggtgagtatatccacttatcaccaatggtattagtaattaaagaggctaaattaggatttgattttataagccatcttctgtgggttattccatttgttttgttgttaaattttttaggataaaattcaaaaaagttatgaagttctctagtctttaatatttcagtatgcagttttgcaacaccattaacggagtgacttccaactatggcaaggtaagccatgtttataaatccgtctgatacaattgccattttatgaactttttctaaatcattatatttttcataaacctctttgcaaaatctttcgttaatttctgaaacaatcataaaaattctaggaagaagttttttaaatagttctataggccatttttcaagggcttcagctaatattgtatggtttgtatatgccataacccttgtggttatactccaagcgtcatcccaagataataattcttcatccataaggattctcataaattcagcaattgcaacagaagggtgtgtatcatttatgtgtacttgcacatatttatatatttctctcattgggcgtcctgttttcttatagcttctaactatgctcttaagtccagcacatacaaagaaatactgctgctttaatcttaagattttaccatctattcgtgtatcatcaggataaagaacttgagatatggattctatagaatacttatgttctacagcttttgaatattgtcctttgctaaaagagtctaagtcaaaatccttatcaatagtctcagcactccaaagtctcatggtgttaacagtattatttttatatcctattataggagtgtcataaggaacagccaaaactggttcataatttttgtgctcaaaataaagtcttccgtccttttcattcatggtaacttctccaccaaattttactatgacagctttatcctctcgcctaacctcccatacatttccgtctcttagccaattatcaggtatttcaacttgatatccatttactattttttgctcaaaaagaccgtagccatatcttataccgcagccatgtcctggaattccaagagatgccatagagtctaaaaagcaggcagctaatcttccaagcccaccgtttccaagaccagcatcgttttcaagctcttcaagttcatcaaggcttatattcagctcgtaaagcccttccttgcatatatcgtatatgcctaggtttaaaatattgctcccaagtagacggcctattaaaaattccattgaaaaatagtaaatttgttttcttgcttgtcttgagtactgattatttgtgttcatccatccttgagaggcatactcttttataagacttccaagtgcaaggtattggtgaagctttgatgatgtatctatatcctctgcatagagtgtcataagtttctttttaaaatcatttttaaaggtttttttatccacgaacatttgaggtcctcctaattttagtatttgtttatagttaccactttgtacaaaaattatgattttatattacagcttggaaaaaaattagtcaatagtaaaatatttgaaatggcaacattacaattatattatttttagtataatgaatatgctattagtcttttaataaaaaagttattaatatagaatagtattaggcaggtgaatttatatgaaaatagctttagggcaaattgatgttttctttgaagataaagaaagaacaaaagaaaaatgcttaaatttcatgaaaaaggcagcagataagaaagcagatttaatcatatttccggaaatgacacttacagggttttccatgaaggtagacaaaattggtgaaaataaatttgaaaccttagagtggtttaaagaaaagtctaaggaatttaacatttactctggttttggatttgttgagggtactaaaaaaggaaaaaataacttttctatatgctctcctttaggtgaggaaatcttaagatatacaaagcttcatccattttcatatggaaatgaggataaatacttttataaaggaaatgaaattgtgtattgtaaaattggggattttaatatttccacttttatatgctatgatttaaggtttccagaaatttttcaaaaagctagtaaagaatcagaatgcatattgataattgcaaattggccaaaggtaagaagagagcagtggattgcacttattaaggctagagcaattgagactcagagctacattgcagctgttaacagagtaggagaaggtgacggtttatactattcaggtgattcaatggttgtaaatccatatggagaaataactgcttttaaaagtgaaaaagaggagcttttgatatgtgacattaacataaatgaagttaaaaaatgcagagaagaattcaggtttaaagaagatagaagagaggagttttattgtaaactttttatgaaaaagtagctctcttgctattttaaaatggtatatcttagaattatatgataacattatattaggtcatacgtccgaattgttttcgatgtataattttgggaggtatcagtatgtggacttattctgaatatataatattttttggaatttattcttttataggatgggtacttgaaactatctttgcaagtgttaatgataaaaaaatagtaaacagaggatttttaacaggatttttttgccctatatacggtttcggggctattttaactgttcaatgttctagaatggtaggtctatcttttaaaaatcctataatttctttaatttcaagtgttatattttctatttttttagttacatttttggagtatgtaacagggtttattttagaggctatttttaactgcaagtggtgggattacagcaatgatgcagcaaacattcatggatatatttgtcttaagtattctcttttatgggggatgctggcctttttgttagtgcaaactatacatcctttgatttctaaaatggtttttaatatatcagcaactacaaaagagaaggtttcaatttttctactagtatatttcatgattgatactataaaatccgtaatagatgcccttaatttaagacaggcaattatggagtattctaatttttcaattaacaaatatcgtgaaagaatactaaaatataaaaggctaattattgcatttccgcgcttaattattttaaatcgtgatataaggagaattgtaaatgataggttctataaaattaaacttgaaatcaaaagcaaaatacaagagctcttttgaagaatttaaagaatgtatttttgatcttcttaaagaggatattgtgctttcaatggataaatttattcaacatagcaatgtcacttgtcttgatcactgcatttatgtttcatatataagttattccatatgtaaaaggtttgggctagattattgttctgctgcaagaggggcactactgcacgacttctttttatatgattggcataagacaaagtctaaggatgggcttcacggttttacgcacccttacacagcacttaggaatgcaaataatttttttgagcttaattctaaggagcaggacattatagttaagcatatgtggccattaactttaaaattacctaaatataaagagagtcttgttgttatatttgcagacaaatactgtgcaattttggagattttaaagcttggaagtagagagaaaatatgtagagaggtgagaaagttttcttaaagtttagctttaaagaagatgagaattatgaatgagtgcaagagtaaaggtaaaaatcaagctaaaagaatattagatgcagctcttaactgtatatctatgaagggatatgctaatgtgtctatgagagatattgcagatgaagcaggggttgttttaagtcagctaagttactattatagaaataaagagggtatatttaaagaaataactaaaagaatcacagaaaaatatctttatgaaattgataatattttaaagagaggtaaatgtgaagaagagaaaatatcctcacttataaaatattttcaagaaactttaaaaaataaccctaataggtttaagattctttttgatttgacaagcatgtctattttctcaaagcctataaaaaatcttttaaacagcttttatgataaggcatcggaaattgtacaaaataatgttatgaatgatcttatagctaaggaaagatttaaaaactattctccaaaagttctctcaaaaatgcttcttggaactctctatggagtatctgcacagtttgttatgagtgataaagatgagaacgtacctgataatatatttgaagagcttagaatgatgtttaggtaaatataaaaggtttagaaaagtataaaagtatatttttctaaacctctttattttaggcctttaaatttttagtattggatctagaactataatctctaagccatattcttatactttcagttaatattattactatcattattattaatataaaggacattactgttaaaagaattttatgctgaggaatgtaggttattatgttttcaattgcagctaaaacagtgttcacacctacaaaggccattggaattatggttattggaatatactttttctttcccatttttaaaagtactgaggtacctacagcaaaggctatagttgcaagcatttggtttgcagtaccaaacagaggccatatggtggatatgttccctgtgtaaagtagataaccccatgcaaaggacataatgccactgaatagtattacattaaaccaggaatttttattagaaaaaggtttatacagctttcctaataaatcttgaatcaggtatcttcctattcttgtaccagaatctatggttgtaagtatgaataaggcttcaaacattatgcaaaagtgataccaataagacataagcgattttaaataaggaattttataaaatacgtaggacattccaacggctaaagatactgaaccgccagttcttccagcaagtttttctccaactaaatgagaaagcataggaagttcctttggaatcatgtgaagctttgcaaatagtgctggtgctgaatttattgcgaagtagtctgaagttggaagaacagttgcagcaataagagccataagagctatgaaagactctataaccattgatccgtagcctattggaagaatgtctctttcatttttaataagtttaggagttgtacctgtgcttataagagcatgaaagcctgaaagtgcaccacaggctattgttataaataagaaaggaaatacctttccaggaataatagggcctcctcctgatacgaattttgttacagcaggcatttgaatagttggtcttacaaagattattccaacaacaagggctcctataactccgagtttcatatatgtgcttaaataatcccttggtaaaaggagaagccatacaggaagtacagcggctaaaaatccgtataaagctaatataagtgaaagctgctttgagttaaaagtaagtaaattccctaaaaatgtgtgttgaattgatggtcccaaataaactcccagcaatatcaatgccattccaattattgttgcctctaaaatcttacctgggcgaaggaattttaaatatattcctactaagaaggcaacgggaattgtaaagccgactgtaaacgttccccaaggactgttgaaaagtgaattaacaatggggagcccaagtccagccatagttattataagtataaatattactgagatagaagttataaatcccattttttctccaagaacatcctttgctatttcagctatggattgtccgtcatgtcttacagaggagaataaaagaatcatgtcgtgaacgccgcctgcaagaacaccaccaaggagtatccaaagtgttccaggaagataaccaaactgtgctgctagtacaggacctataagaggaccagcacctgcaattgctgcaaaatggtgacctaaaagtacccatttatttgtaggtacataatcacgtccatcattatgagtttcagatggaaccgttcttgtttcatctaagactaaaaccttagcagctataaaataaccataaaccctataacctataataagtactaaagctgctataattacgagaactatagaattcataaaaaatcccccttcactagtttatattgctatagtacaacttatattttggaaaaaaaacacaataaacctaaatatacaaaaattctttgtaaaatgcaaaaaatagcacttgaatggcataaaatattgcaataatataaatatgtacataaattaaagtacataaggacttataaagtaaaaaattcaaagaaacatgatatactaaaaatatatacgaaggaatgcctacattaataatatatgagaaaactttcgaattcaaaacaatgaaattagcacttgtagttttataaggggtacggcttaaacttaaatataaacgtaagataaagagcttaaatagaaagctttgataatacagaaaactagttttaagataccaattttgggagcgaggcatgatgaatgaaaataaagtgcattttaatagaagatgaaatttctaatgagaaagagttatattttatattaagaagatatgatgatattgaaatagtaggtatggtacaaaatactgatgaaggaatagatcttgttaagaagttaagaccgcaggctgtatttttagatataaatgttccaaactttaatggaataaaactagctgaggaaataaaagatgtggacagtactattgcggttatttttgtaactgcttatgataaatatgctgtagctgcttttgagattaaggcacttgattacatattaaaaccttttagtatagctagaattgaaaaggctgtagaaaggcttaaggaatatattaatgttaacaaatccatgaaggagaagttatttgagttaatatgtgaatttaataacatggaaagaaaatatattattaataagataccatgtgaaaataaaggaaaaattgtacttgtggatgtaaatgatatatattttttctatattaaatcagagaaaacatatgttaaactaaatgatattatatatgttacaagcagtacattaaatgatatggaaaagaaaacaggattttttagagctcacagaagttatcttgtgaatttaaacaaaatatttgaaatttactcttggtttaatggtacctataagcttattatgagtgattatagaaaatcagaaattcctgtaagcaggggaaacgttagaaaacttaaagagattataaatatataaaggagagagggcattgaaaccactagcagatagaataaggccagaaaattttaatgaggtttttggtcagaagcacataattggtgaaggaaagatattagatagaattttaaaaagcagtttggtgccaaacatgatattttacggaccacctggtacaggtaaaacaacagtagccaatataatagctaaaaagacaaataaggctttttataaattaaatgctaccacagcgtcagtaaaggatgttagagagattacagacagcacaaatacgcttatggggagaaatggtgtgcttttatatttagacgagatacaaaacttcaataaaaagcagcagcagtcccttttagagtttatggaaaacggtagtattactctaattgcaagcacaactgaaaatccatatttttatgtgtataatgcaatcttaagtcgttctacaatatttgagtttaaacctttagagagcgatgaattaatgaaagcagttaatagagcagtggagttaataaaagatgaacttaaaactacagaaataataatcacagaagatgctaaaaagtacgctgtaggggttagttcgggagacgttagaaaaaccttgaattctattgaaatagcagtttattctacaaaaccaaatgaagagggaaatatatttatagacttagaaaccatgaaggaatgcactcaaaaaaatgtattgaattttgataaagatggtgataatcactatgatattttaagtgcatttcaaaaatctataagaggaagtgatgctgatgcggcagttctttatcttgctatgcttataaaaggtggagacttaaaatcaatatgcagaaggcttcttgtaatagcagcagaggacataggacttgcatatccacaagcaatatctatagtgaaagcttgtacggattctgctttagaattaggatttcctgaagctagaattccactggcagaggcagttatacttcttgcaacctctcctaaatcaaattctgcaattacggcagttgatagtgctttaagggatcttgatactataaatgttggaagtatccctgattatttaagagatgggcattacgaaggtgctaaaaagcttggaagaatgcaggactataagtatcctcacagctatgagaacaactatgtgaagcaaaaatatcttccttcaaatttagaaaatagaagatactacgagtacggaaaaaacaaaatagaggagaagtgcagagaatattgggagaggataaaatactaatggaaagctctaataataaaataaagctgtctgtaagaaatttagtggaatttgttttaaggtgtggtgatttagataacagattctcaggtggcagtagtagagccgtggaaggtacacgtgcacatacaaagcttcagaaacagagtaagaagttagctaaagagaaggaaaactacatttataattcagaggtttttttgaaatatgaaactgagttagaagatgttgattttataatagagggaagagccgatgagatttttatagataattattgtgtaactataaacgaaataaaaagtacaggaagacctctggaatttatagatgaaaattttaatataatacattgggcgcaggttaagtgttatggctatatttatgcagagcagaataatattgaaaatctcaatataagtcttacatattttaatatagatactgaagaaattaaagttttgacaaaagaggtatcctttgagtatcttaaaaaggaattttttgaatatcttcagaagtacgtatattgggcgaagatggctattgattggcaaatagttagagacatatcaataggacaatgcgatttcccttttaaggagtatagaaaaggccaaagaaagttagctgtatatgtttataagactataaaggaaaagaaaaagctatttgtaaaagcccctacgggtataggaaagactatttctacactttttccagcagtgaaagcatttaaagaaggggaaattgaaaaaatattttatttgactgcaaaggggactacggcattatctgcattatcggcggttgagcttctaaataaaaaggggcttaggttaaaaacattaattttgacttcaaaggaaaagatatgtttcaatgaagaaacaaattgcaatcctgaggaatgtatttatgcaaagggtcattatgatagagtaaatgatgctattaaggatttacttaaaaatgaggatatctacaatagagagataatagaggagtatgctaagaagtacaatgtatgtccgtttgaattatctcttgatatgtctttgtggtgcgatttagtaatatgcgattataattatgtgtttgacccttcagtgtatttgaagagatttttttcagatgcaaagggaggatatgtgtttttagtggatgaggctcacaaccttcctgacagagcaagggatatgtattcttcagagctttataagagcaaagtgatgtttttgaaaaaaaatttatctaaaaaggactacatctataaaaccataaacaatataaattctttttttataaatctaaagaaattaagtgaggataagggatatataattgatgaagatgataactacgaagaagcagctaaagtaatttataaatttctaaacaagtgtgaaaaatggattcttgaaaataaggaacataagatttataaagaaatgcaggaattttatttggatgctttcaaatttataaagacatatgaattgtattcggataattatattttttatggtgaaaaaatatcttctgattttaagataaagctattttgtttagacccatctaagtttattgaggaaactgttaagaagggtataagtgcagtatttttttctgcaaccttaagccctatgaattattttaaagaaatattaggagcagaagaaggggactataatgctacctttgcctctcctttttcagaggacaatagatgcatatttattgctaaaaatatttcaactaagtatgctaaaagagaacaaaattatgatgcagtagttcagtatataagaagttttgtgcttcagaaaaaaggaaattacatgatattctttccatcatataaatatatgaataatatttacgataggtttagtgcaggtgaggattatgaggttatacttcaaaaaagcagcatggatgaaactgaaaagaatgattttttagctgcatttaacgatgaaagcgaaaagggaactataggtttttgtgttcttgggggtgtattttcagagggtattgatcttaagggagaaagattaataggagcagttatagtaggggtaggtcttcctatgatttgtttagaaagagatatgataaagaaatattttgacaataggaataacctagggtatgaatattcatatatgtatccaggaatgaataaagtacttcaagcagcaggaagggtaatacgctcggaaagtgataaaggagccatcatgcttttggatgaaagatttgcgaagtattcttataagaagcttatgccttctgaatgggaaaatgccatatacagcagtggaaatttagaaattgaaaaaaaactagaaatattttgggcagattggtaaaaatgcaagttttctattgaaaaaattcactttatcattataatatttaataacggtatttttaaaaaaatatataatttatactgcgatttgttgaaagttttgttttttttgcaatataaagttaataatgatagaattgggggctaagatatgacaagaaatattggatatcctgaaaagcaggggctatatgatccagcttttgaaaaggataattgtggaattggctttattaccagcataaaaggtgaaaaaagtcatgacatagtaaaaaaaggtatagaaattctcgttaacttaacgcatagaggggctgttggcgcagatacaaaaactggtgatggagcaggaataatgctgcaaattccagatgaatttttcagaattaactgtgataatcttggtattgaacttcctgaaagtggtaaatatgctgttggaatgatttttctgcctaaagaaacagcattatcatatcaatgtgaaggtatacttgaaagagcagtagaagaacaggggcagaaggttttaggatggagagttgttcctagagataacaggtctattggggaaacagcaaagggcagtgagcctgttataaagcagatatttataggaagcaattgtgaaaaccaaactgattttgaaagaaatctctatataataagaaaaagagctgaaagtgaagttaaaagactagtagaaagaggatcggagtacttttatatatgcagtctttcaagtagaactatagtgtacaagggacttttgcttgcagatcaaataaaaagcttttatatggatttaaacgatataaatttcaagagtgctattgctttggttcatcaaagatatagtactaatacttttcctacttgggatttagctcaaccatttagattcttagctcataatggagagataaatactataagagggaatagaaattggatgaatgcacgtgaaggtgttttaaaatctgatgtttttggaaagaaaatatctgatttatttcctatagtaaacccaaagggaagcgattcaacttctttggataatacatttgaacttttagttgctgacggaaggccactagcacaggcacttatgatgcttattccagaggcttgggaaaacaatgaaagcatggagacatggaaaagggcattttatgagtatcagggaactttaatagagccttgggatggtccagcagcagttgcatttacagatggtcagcaggttggagctgttctagatagaaatggacttagaccagcaaggtatcttataactaaaaacaatatagctgttttggcttcagaagctggtgttttaaaatttgagcctgaagaaatagcttataaagggagacttaaacctggaaagatgttccttatagatacaaaagaaggaagaataattgatgatgaagaaataaaaaaatcaatttgtttagataaagagtatgaaaaaatagtagaaaagaataaatttactttagatgattttgaagcaactgttggagaagaagtagtaaatgatgaagttttgaaagaaaaacagcaggcttttgggtatactcttgaagacttaagggtaatacttggccctatggcagctactggtaaagaacctttgggatcaatgggaaatgacgctcctttggccgttctttcaaataaatcacaactgctttttgcatactttaagcagctgtttgctcaagtaactaatcctcctatagaccctatacgagaggaaatggttacatctcttgtgaattatataggttctcaaggaaacatattgaataaagatactgaagctgttccttttatagaaataaattctcctattttgacagatcttgaaatggagaagattaagaatcttagaaataaggatttcaagacaactacaatacctattacatttaaatatgatacaggaattgacggatttaaagaagcacttgagaagatttgtgaaagagcttctaagagaatagaagagggatttaatgtaattgttctaagtgataagcacatagattcctatgaggcagctatacctagtttacttgcattaagtgctgttcagcatcatttaataaaggaaaaaactcgtacaaaggtatctattgtagttgagactggagaagcaagagaaactatgcattttgcactgctcgttggctacggtgcaacagcagtaaatccttacattgcttttgagtcaattaggcaaattgtaagggaaaaggatattgaagtagaaagtcaagaaaaagctatagaaaattatatttatgctataaatcatggaatattaaagatattatctaaaatgggaatatccacacttagaagctatcatggtgctgaaatttttgaagcagtaggacttagcagtaaacttgtaagtgaatactttgaaggaacaccatctagaattgaaggaataggcatagatgaggtagcaaaagaagtattaaatagatataaaaatgcttttaataaaataagaaaaccagtatctgttttaagcgttggaggacagtattcttggagaaaaaatggtgaatatcatttgttcaatccagatactatatatagacttcaggtttcagctagaactggaaactataaaatgtttaaagagtattctcatattataaacgatcaggacaagaatctttgcactataagaggcttgtttgaattcaaagacttaaaacctataccacttgaagaggtggagcctgtaaatgaaatattaaaaagattttcatcaggagctatgtcctttggttcaatcagcaaggaagctcatgagactatagctatagctatgaatagaataggcggaaagagcaacagtggtgaaggcggagaggataatgaaagatacaaggctgatgctaacggcgatttaagaagaagtgcaataaagcagatagcttctgctagatttggagtaacagcagagtatttagtaaatgctgatgagcttcaaataaaaatggctcagggagcaaagcctggtgaaggaggacaactcccaggaagaaaggtagatgtcaatatagctaaggtaagacattctacaccaggaatagaccttatttctccaccaccgcatcatgatatatactctattgaggatttagctcaacttatatttgatttaaaatgtgtgaacccttcatcaagaataagcgtaaagcttgtttctgaagttggagttggaactgtagcagcgggtgttgctaaggcacatgcagattcaatacttataagtggtcatgatggaggtacaggtgcatcacctatatcatcaataaaacatgctggaattccatgggagcttggattatcagaagcacagcaggtactgcttttaaataatttaagaagcagagtagttcttcaaacagatggacaattaaaaacaggtagagatgttgtaatagcagctcttcttggagcagaggaatttgtttttgcatctaccatacttgtatccttaggatgtgtaatgcttagaaactgccatcttaatacttgtgaaatgggaatagcaactcaagaccctgaacttagaaaaagatttaaaggaaaacctgaatatgttataaacttccttacatttatagcacaggaagtaagagagtacatggcacagcttggctttagaactataaatgaaatggttggaagagttgataaaatacaggcaaagaatgctgtaagtcactggaaggctaaagggattgacctttctaaaatattatacaagcctgacatgccaaagagaataaaaccatattgtacagtagctcaagagcatggtttagatagaataatggactacaagttaattcaaatagcaaaagatgctttgaactctaagaaaagtgtggttggaaactttgaaattaaaaatgtagatagatcagtgggagctatgctgagtggtaaaattgcaaagatatacggagaaaatggacttccagatgatactataagatttaatttctttggttcagcaggtcaaagctttggagcttttggaatgaagggtatgacaattgtgcttgaaggagaagccaatgattatgttggaaagggcttatcaggagccaaaatagtaataaaaactcctgaaagagcaagttataagcaggaagaaaatgttatagctggaaacaccattttatacggagcaaccagtggaaaactattcataaatggaatggttggagaacgttttgctgtaagaaatagtggagcatatgctgttgctgaaggtacaggagaccactgctgtgaatatatgactggtggaattgctgtggtacttggagagacaggaagaaactttggagctggtatgagtggaggtatggcatttattcttgatgaaaatgacacttttaatgataaatgcaaagctgaaactcttgaaattactagtgactacgatgaggaagatgaaaaagttcttcgtggcttaattgaggagcactacaattacactaatagtgataaagctaaagttatattagaaaattggggcgaatataagacaaaaataaaaaaggttattccaacagcatataaattgatacttgaaaaatcaaaacaaaaagctgctgcagttaatatgtaagggggcggaaaaatgggaaaggtaactggatttaaagaatacgatagagaagagtcgccatctcgtccaatcgatgagagaataaaggactacaaagatgttcatatgggacttgacaaggaaaagctgaaaattcaaggtgcaagatgtatggaatgtggtactccattttgttcatggggctgccctcttggaaatttaatgcctgactttaatgacatggtatataaaggtgagtggaaaaaggcttatgaaaggatatctttgacaagctgtttccctgaattcacaggacgtatttgtccagctttatgtgaaggttcgtgtacattaagttacaattctgatgctgtttcaataaaagaaattgaacttggaattatagaggaagcctttaaaaatggatgggtaaagcctaagattccaaaggttagaacaggcaaaagaattgcagtaataggatcaggcccagcaggactttcggcagcagaagaacttaattctgttggacacagcgtggtggtatttgaaagagctgataaggtaggaggacttttaagatacggcattcctgattttaaacttgaaaagcatgtaatagatagaagaattgacgttatggaaaagtctggaatagagtttaaaacctctactaatgtaggttttgatgtgagtgcagaagaattacttaatgattttgatgtagttcttcttacaggaggctctaccatacctagagatttaaaagttgaaggaagagagaatattaaaggggtgcattttgctgttgattacttaaaacagcagaatatgagaaatgctggaatggaaattaaagaagaggaaataactgcaaaggataaagttgttgtggtaattggaggaggagatactggttcagactgtattggtactgcaataaggcagggtgctaaaaaggtatatcagtacgagataatggataaacctccagctcaaagggatgaaactatgccttggcctttatttcctagagtgtttaaaaccactacatctcatgaagagggctgtgaaagattattcggtgtttcaactaaaaagctagaaggaaaagacggtaagcttgaactccttaaaggtgtacaagttaagtgggaaaaagatgaaaatggaaaaatgtccatgaaagagatagagggctcagagtttgaaaagaaggtggatttgatacttattgctatgggatttgtacatcctcagcataagggtatagttgaagatttacagctgaaattagattctagaggaaatgtttttactgatgaaaactttatgacaagccgagaaaatgtttttgcagcaggggatatgagaagaggtcaatcacttgtagtatgggctatgcatgagggaagacaatcagcaaaagaaatagataaataccttatgggagaaacttctcttagaggataggttttacagtaaaggcagaggcttattagggcttctgcctttattttctatatgtttatatatttatactgaattgacaatacagctgccttttgatattataataatacaaagtagagtattattgtcggaattaaggaagtgagttaatgaaattatctactaaaggtcgatatggagttaaagcaatggtagatttagcgattcattatggtgctgagccagtttcaataaaaagtatatcagagaggcaaaagatatcagaggcttatttagagcagcttttcgttccgcttagaaaatcaggtctaattaagagcatacgaggatctcaaggaggatatgttctatcaaaagatcctaaagatattcatatatcaaatatctttgatgttcttgaaggtccaatagagatttcagactgtgtagaaagcgacagctgtgataatagtgattactgcgttacccgtcttttgtgggttaaaataaaggaaagcatagacaatgtaactaagactataaccttaaaagatatggtagatgattataattctattaaaaaccaatagagattttatatccttacatttaattgtacatgtattaaatgtaaggatattttatttttaggtatattaaaagtaaaagcatacataataaacacatggtgatatatatgattagaagtagagaatttataggtgcagatgtttattctacaaagggagaaaaaataggagcagttgatgatgttatcttgaactttagctctggttttgtgttaggctttaaaattaataaaggaaaagtatttaacaaacactgctgcatttctgtaaaaaatatggtgagttttacttccaagatgattgtaaactatgtgccctataaagggagttttataaggtttaatagcataaaaaatatggatgttataaattatgacggtacaattcttggaatggttgaggaaataatgtttgatgaaaagacctttaaaatcaagggaattattgtatcaagaggttttttcgctaacctagtttcggggaaaaaaataatactggaaggcaactatatgctgggtaagaaaaatttgttctgtttttccaatgataaaaatttaagttttgtaagggtgtttcactcgatttcaatggaagatgataaaaatgaaaaaaatatatagatatattattttaattcttggcattattttaacctatattttgctttatttattgtttaaaaaagttaaaattttaagtgaaataatttatattattttagtagcttttttaattgcgtacactgttaaaccttttcataagtgccttgtaaaaaagggcttaagtgctagaaaatccgcagcatttcttttaggtagtttaacgcttttttgtatattgttcatgttttttttagtgccttctatatttaaagaaacacttaatataaatatgactaaaaatgaaatacagtattatatagactttttaaataagaagttaaaacctacgcttcaaggaatggctggagaaacttttatagttaccatatactcaaagtttaataatgaacttagggaaatagtatcgaagctctttaatttcgttatgagtattggaaaaaacatagttgatattgcaatagttccaataatatcatattattttcttgcagatggggaaaacataagaaacaaaatactagtaatattccctttgagctataggaagcttgtaaagaaaataatgtgtgatgtagataatgttttaagcaaatacaatgtgactcaaataatattatgtacctttgtaggcttgcttacattcattatccttatagtatttaaagttgattatcctataatattgtccatagtaaatggcttgtttaatataataccgtactttggtcctatttttggagctattccagctataatcatagcatttttacactccacaaaggttggtatttatactacagtatgcctttacattgttcaaataatagagggtaatttgattgcacccaaaataacaggggaatccattgacatgcaccctttaattgtaataattttattgatagctggagaaaaaattgctggcttttggggaatgatacttgctatacctgtaggagtcataataaaagttatttatgaggatttgaattattaccttttttagtagtttatattgacatatgcagatttatcttttataatatgtgttagttatattagagtgatgatgagaattagtaaaatcaatttgcatataaagagaagaagtggttggtgaaaacttcctatgtaatgatttgaagctatctctgaacttttttaagagagacactttattttagtgtaattagggtggtaccgcggaattatagctttcgtccctttgtttagggatgaaggcttttttgtatattgaattaaattggaggagattggattatgaaatacatgggattaaatgatataagagaaagctacttgagtttttttgagaaaaaagagcatttaagacttccgagtttttcactcataccgaaaaatgacaagagtcttttgcttataaatgcgggtatggctcctttaaaaccttattttactggacttcaaactccacctaaaacaagagtaacaacatgtcaaaagtgtataagaactggagatatagaaaatataggaaaaacttcaagacatggtacattttttgagatgcttggaaacttttcttttggagattattttaaagaagaagttatttcatgggcgtgggagtatataacagaagtacttaagttccctaaggatagaatatatataacaatatatcttgatgacgatgaagcattcaaaatttggactgaaaaagcaggagttgatcctagtagaatatttaggttcggaaaagaagataatttttgggagcacggctcaggtccttgcggtccatgttctgaaatgcactttgatagaagagaaaagcctgatcttataaaaacaagagaaaaatttattgagcttcaagataaggatgaagtaattgagttttggaacttagttttcactcaatttgataaagatgaagatggaaactacaataagcttaaaaatcctaatattgatacgggtatggggcttgaaagaatagcaactataatgcaaaatacagacagcatatttgaaatagacactataagagaggtgttagatgctgtatgtaaaatatgtaatgtaaaatatggtgagaaccataaaaatgatgtttctcttagaataataacagatcacataagaagtgtaactttcatgataagtgatggtatattaccttctaatgagggaagaggatatgtacttagaagacttcttagaagagcagcaagacatggtaaaactttaggaatagaaaaaacattcttatgcggattgtgtgatgtggttataaaaaattctaaaggtgcttataaagaacttgaggaaaagcaagattatattaagaatgtaattgaaatagaagaaaaaagattcgatgaaacacttgacagcggcatggaaatattaaagaattatatagatgaattgtctcttgaaaacaaaaaagtaatgtccggtgaaaaagcattcagattgtacgatacctacggttttcctgtagaacttactcaagaaatattagaagaaaagggcattgaaattgacatgaatgatttccatagtgaaatggaaaagcagaaaaatagagcaagagatgcaagagaagaatcaaattacatgggtaaagaaataaaattaattgataaattacctgaaagtgttactacaaaatttgtaggatataattctacaagtacagattcaaaggttgaagttttaataaaagatgatgagtttgtttccactataaacgaaggagaaagtggaattgttgtaacagaggagacacctttttatgcagagatgggtggacaaataggagataaaggtattatttttggtaaaaatggagaagctaaagttgttgactgcaagaacaatatatcagggaaaataatacatatagttcaggtagtaaaaggctcaatagaaaagaatgaaaatgttactcttgaagttaactataaaaagagaaaagatatatgtaagaatcatacagccactcatatgcttcaagcagcacttaaaaaggttgtaggaagtcatataaatcaatcaggttcttatgttgataatgaaagattgagatttgattttacacatttcacagctcttactgatgaagaaattttaaaagtagaagctatggttaatgatgaaataatggctgcatatgatgtgaaaactgatataatgtctgttgacgaagcaaagaaaacaggagctatggctttatttgatgaaaagtatggcaatagggtaagagtagtatctgttggagacttcagtagagaattatgtggaggtacccacgtaaataattctggtgaaataggcttatttaagataatatcagagtctggtgtagcagcaggaataagaagaatagaggcaataacaggtaaagaagctgttagatatactgaagaaaatgataatcttataagaaatattgagcaggagcttaaatgttctaagaaggatattttaaataaaataaatcaatatcatagtgaattaaaagaaaaagaaaaggaaataaatatccttaaaggaaagttagcttcaggctttgaagaaaatatactaagttcagtaaaggaagtaagtggagttaagtatgttgcctctgaagtaaaaggaataagtggagataccttgagagaattatgcgataaagtaagaaataaaatagacgatggtatggttctacttgcaagtaaagatggcgaaaaagtacaatttgtagcaatggcttcaaaaaatgcagtaaaaaaaggcgttcactgtggaaaagtaataaaagaggttgcttctatgtgtggaggaaatggaggcggaaggccagatatggctcaagctggaggaaaagatggagaaaaattagaaactgcgttaaaagaagtaggaaatattatggaaaaattagtaaagtagtatacaattactaaaatatgctttataatatatagtatatttcagtataaaatcttttcactaacaaaaaaggggtgagtgtaaattggggagtgaaattaacgataatacaattgagtttgatgttttgaaaaataaagaggatttaacaaaagagatattgaatgaagtttacaattcattaaaggaaaaaggttataatcctattaatcaattggttgggtatttgatatctggagatcccacttacataaccaattacaatggcgcacgtgctttagtaagaaagcttgagagagatgaaatacttgaagaagtattaaaatcatatcttggtataaaataaaagtgctcttaggagcatttttattttaacttaagttttaattatgtaagtttacttataataaaaaggagatttgtatgaggatactcggtattgatgtaggcaataagactataggagtagcacttagcgatccacttggatttacagctcaaggtataactactataagaagaaaaaacgaagaagaagatataaaagaattgaaagaattgtgtgaaaaatatgaagttgataccatagtgtgcggtcttcccaaaaatatgaatggtacaattggatttcaaagtgaaaaagtgcttggattttgtgaagttattaaacaaaacataaatgtacccataaagatgtgggatgagagattgacaactgtaactgcaaatagagcgatgcttgaagctgatctttctagaaaaaaaagaaaaaaattagttgataaagtagctgctacatatatacttcaagggtatctaaacagtatttaatacattgacaaaagttaaaggtaactctaaaatatactggaggtttagtttcatggataatgatataactcaaataacacttatagatgaagatggtgtggaaagaaatttccaggttgtaaccaagatggatatagaaaacaaggaatatgtagttgttgttccagaagaatcaaatgattctgaagcaataattcttagaatagataaagactcagatggtaacgatgtattagtgacagttgaggatgataatgaatttaatgtagtaagcgaggcttatgaaacattgttttcagaagatgatatgaattaaaatatatgggatgggaggtatgtaagatggcaaaattatctcctttagaaatagaaaaactaaagaacaatcttaaagataaaggatataagcttactcctcagaggagagccgttttggatattataattgataatgaagggcagcatcttacggttgaagaattgtatgatttagtaaagttagaatgtccggagataggtttagcaacagtatatagaacagttcaacttttagatgaactgggcgttataagtaagttggatttaaacgatggcttaagcagatatgaattggtgcacgaaaatgagccgcatcaacatcatcatctaatttgtactgcatgtggaaaggttacagaagttcagggagatttattagatgaattagaagattgtatagaaaataagtaccatttcttaattaaaaaccatagcgttaaattctatggaatatgcagtgaatgtagaaaaaaactataaataatatttgtagtttaaatataaaaattaaattaataaaatcgagtaacgaaggagggtagtagataatgcgacgagaaaaagataagattaaaattatacctctaggtggggtggatgaaataggaaaaaatcttacggttatcgaatacagagaggagatagctgttatagattgcggtcttagttttccagatgaagaaatgttcggtatagatttagtaatacctgatgtaacttatttaataaagaatagggaaaaggtaaagggaatatttttgactcatggacatgaagatcatattggtgcgttgccttatgttttaaaagagttaaatgttccggtatatggtactaaacttactattggaatagttgaaactaaacttaaagagcataatttgcttagtaaagttgatttaaaggtagtaaagcctagggatataattaaactcaatagcatgtctattgaattcataagacaaagtcatagtattgcagactctgtagctattgcaatacatacacctatgggtgtagttcttcacacaggagattttaaggtggattatacacctatagatggatgtgtagcagattttgcaagatttgcagagcttggcaagagaggtgttcttgctatgatgtgcgacagcactaacgtagaaagaccaggatatactatgtcagaaactacagtgggggaaacttttaacactgtatttacaaaggctaaaggaagaattatagttgcaacttttgcatctaatattcacagaatacagcaaatagttgaggccgcagaacgctataatagaaaagtagcggtttcgggaagaagtatggaaaatatagtagctgtagctattgaacttggttacctaaaagttaaggaaggtgttttaataggcattgatgccataaatagatacgccgataacaaaatagttataattactacaggaagccaaggagagccaatgtctgcacttacaaggatggcagctcaggaacacaaaaaagtaaaaatacaggaaggcgatatggtagtaatatcagctaaccctatacctggaaatgaaaagttggtttcaagagttataaatcaattatttaaaaaaggtgcagaagttatttatgaagctttggcagatgtccatgtttcaggtcacgcttgtcaagaagaacttaagctaatgcatactcttataaagcctagattttttataccagtccatggagaatacaggcatttaaaacagcataaagagctggcaaccaatttaggaatgcctaaagctaacgttgtaattccagaaatcggtggcgttatagaattaacaagaagcagcataaagaaaaccgatactgtagttgcaggtaaagtgtttgtagatggtcttggtgtaggtgatgtaggaaatatagttttaagagatagaaaacatctttcacaggatggaatagtaacagttgttgttactatagaaaaagtaagtggtactgtaattgctggacctgacattatttcaagaggatttgtgtatgtaagagaatctgaagatttaatggaggagtcaaaagaaattgtaaagacagcactgcttgaatgtgaagaaaagcacattacagagtgggcaactataaaatcaaacataaaggatgtattaagaatattcctttatgagagaacaaagagaaagcctatgatacttcctataattatggaagtgtaaatttaattcatattagaggaattaaataaaaaaataaataaattttttatgaaatagtttactttggtttaagtagattgactttttaaatacttaatattaaaatattaattggtactagaaaattggatgctttacgtatccaatttttatttatgatttcacgtagtattagtgaaatatacggaggaagagaaatggaaaaaattactagaaatgatataagaaatattgctataatagcccacgttgaccatggtaagactactctcgtggatgctttacttagacaaagtcatgtttttagagcaaatgagaaagttgaagagagagtaatggattctaatgatctagaaaaagaaagaggaataacaatactttctaaaaatacatctttaatgcatgatggaattaaaattaacatagtagatactccaggacatgctgattttggtggagaggttgagcgtgtacttaaaatggtagacagtgttcttcttttagtagatgcttttgagggacctatgcctcagactaaatttgttttgaaaaaagctttagagcttaaattaaaaccaatagttgtaataaataaaatagataagccaaatgctagacctatggaagttgtagatgaagttttggacttgtttatagacttaggtgcagatgaagatcaacttgacttcccaatagtttatgcttctgcaaaagctggtattgctaagcttgatgtagatgatgaaagcgaaacaatggaacctttgttcgagactattgttaaatacgttaaaggtcctgaaggatatcttgatgaaccacttcaaatgcttgtttctacaatagattctaatgaatatgttggtagaattgcaataggaagagttgaaagaggatctataaagaagaatcagcaggctgttttaataagacgtgatggagcaaaggaaaatgtaaaaatttcaagcttatttacttatgaaggtcttaagagagttgaagctgatgaagttaagtttggagatattgctgtagtttcaggaatacctgatgttaatatcggagaaacaattgcagatgcatctagaccagaagcattaccttttgtagatattgatgagcctacattaagcatgttcttcatggtaaatgattctccttttgcaggtagagaaggcgatttcgttacatcaaggcatttaagagacagacttgaaaaggaattagagacaaacgtaagtttaaaagttgaagaaactgattcagctgataaattcaaggtaagtggaagaggagaacttcatctttcaatattgatagaaacaatgagaagagaaggattcgaattccaagtatctaaaccaactgtaatatacaaagaggaaaatggtaagaagttagagccaattgaagagctcacaatagacgtaccagaagaatttatgggcgttgtaatggagaagcttggacctagaaaggctgaacttgttaacatgacttcagctgtaaatggttatacaagattagagttcaaaataccttctagaggtttaattggattcagaaatgagttcatgacagatacaaagggaaatggaataatgaactctacacttatagattatgaaccatttagaggagatattcctgaaagatcaagaggatctatagttgtttttgaaacaggagtttcagttgtctatggattgtacagtgctcaagaaagaggaagattatttgttggtgctggagtagatgtttacgaaggaatggtagttggagaatgttcaagagccgaagatatcgaagttaatgtttgtaagaaaaagcatctttcaaacactagatcttctggagctgatgatgctttaaaattagttccaattcctgacatgtctttagagaaatgtcttgagtttatagcatctgatgaattggtagaaatcactccaaagagcattagaatgagaaagaaagtcttagatacaaatttacgtaagaagaaaagaaaatagcttttagaggaatgggtaatatgaaagtacaaactattttaaagaagaaagtttatatatttctgtttttaatcctagtattaatttgtgcatcagctgcatattttaagcatgctatgaattacccttttaaaattaaaaacgatgttagttttcaagtaaataatggtgataatccatattctgttatgaacagattagataaacagaatatgattaagaataaactatttataaaagcttacattaaatataataaagttcccggtgatataaagccgggactttattcaataaaaaaaggggaatcttcaaagaagttttttcaagatatagctgaaggaaacttttctagtgactatgttaaggttactatacctgaaggatatgatatagaggagattgctaatttatttgataaaaagggattaataaatagagatgaatttataaatgcttgcaagaattatagtatacctaagtacataaaaaatgacgacaacagaaagtataagcttgaggggtacctttttccggatacctatgaatttaaaaaaggtacaaagggaaaagatattattgatactatgattaagagatttgatgaagtatttaaacaagcacaaaaggacactggcaagagtggaagcgatgtggaccaaacaataataatggcgtcagttgttgaaagagaagcagaagtagataaggatagaccagttatagcttccgtattttttaacagactaaaaattaaaatgaagctgcagtcttgtgccacagttgagtatgcacttggtcatcacaaaaataaattgtccaatgcagatttaaagacaaaatcaaattacaatacctatttaatagacggtatgccggaaggaccaatatgttctccaggtaaagaatctattaaagctgcgttaaatccttccagcacaaactatatttattttgtttcgaataatgatggaactcacttctttacaagtgattataatgagtttttaaaggttaagaaaaaaactcaaggattttaatttggaggaaattttatgggcaaaataatgtatgactatataagtgattatattagaaatttaattcctgagcatgaaggtgtattaaaggaattagaagagtatgcggcagaaaacaatgtgcctatagttcacaaagagacagcaaaatttctcgaatttatgatgcaggtaaaaaaaccacttaaaattttagagcttggtacggcaataggttattctgcatcacttatggctttgaattcaaatgcacatatcacaactgttgatagaagtgataaaatgattgaaattgcattagaaaatataaagaagtttggattagatgatagaattgaagttctaaatggagaatgtatagatgtaattaagagtttaaatgacaagtatgatgttatttttatagatgcaggaaagggacattacgaggacttttttaacgagtctttgaggattctaaaggatgacggcataataatagcagataatgtattatttagaggaatggttgccagcaatgatcttttagagagaagaaagattacaattgttaaaagaatgagaagataccttgacgttgtttctaatagacctgactttactacatcagtaattccaatgggagatggaattgcagtcacaacaaggaggaaaagcaatgaataaacccgaacttttagcaccagcaggtaatattgaaaaattaaagacagctattgaattcggtgcggatgctgtctatttaggtggtagtaaacttaatttaagagcttttgctgataatttctcgctagatgaattaaaagaaggaatagaatttgcacacagccgaaataaaaaagtgtatattacactaaatgtttttcctcataatgaggatttaaacgggcttgaagagtatttaaaagatctttatgaaattaaggcggatgcagttatagtatctgatccaggcataattatgacagctagagaagttgtacctaacctggaaattcaccttagcacacaagccaatagtgttaactataaaacagctatattttggcataagcagggagttaagagaatagttgtagcaagagaactttcattaaaagaaataaaatcaatgaaagaaaaaatacctgaaacttgtgagatagaggcatttgtacatggttctatgtgcatatcttactcaggaagatgtcttctttctaattatatgacaggaagagattccaataggggtgcttgtgcacaaccatgcagatataagtattcattggtagaagaaaagagaccaaacgaatacttcccagtttatgaggatgaaaagggaacttatataatgaattctaaggatttgtgcatgatagagcatataccagacttaataagtgctggaattgattccttaaagattgaaggaagaatgaagagttcatactatgttgcatctgtagtaaaagcatatagagaagctattgacacatattttgaaaatccagaggaatataagtttaatgaaaagtggatggaatatcttactaagccaagtcatagaagatatactacaggattttattacggcgatagtaataaacagcactatgaatcttcatcttatataagagattttgatattgttggtatagttagaagctatgataaagaaactggaatagcagttatagagcagagaaataagtgttatgctggagataaagtggaggttttaaggcctcgtggagaaaaccttgaaatagaacttaaagatttgaaaaacaaagatggagaggcaattgagagcacacctgtagcgcaaatgatatatactattaaaactgataaagtgcttgaaagcggaaatatgctgattaaaggtaaaaattagcatgtaacctgaataaaataccttattttggtccaaaatggattaaagtgaggtgttttttttatggagagaacaagaataaaatgtattttgatttttttaggtatatttgcggtatttgcatttctatgtacaaggctttatttaattatgaatgtatatagtaaagatttagagactaattacagcagacaaaatacatcaagtgagagaattaaaaatataaattatgatgttgtggattgtaatggcaaaaatatgcttacttttaacagaaaatattatgttgtaataaatccatatatttttacgcaaaacaatagtgatacaaataaaagagagctttatgcattatcttatatattaaaaaattacgataataaatacgatttaactaacatagatattaaaagcgaatcaagcaaaatatactggagcatcaatgaaacactttataatgatctttcaaagtttaaaaatgtaaatggagtatatacttattttgttgatgaggtaaatagggataaggcttcggatatatgcaacattattacaaatcctatggataaggataacaagaagtttaaagccaatgcctctatagaaaaagctgtatataatgaatttaagaattccccatttcctgaaaaaaactttgtaaatgattcatatggaaatctaattgcaactaatggtgggcaaaataaaggtaaatcagaggttaaattaactatagataaggacattaatgataaagttcagaatatactagacagcagtggattgaaacaggtatcagcaattttaatgcagagtgataatggagcagtaagagctatggtacaaaaggataaatatgcccctaacataaatcttggtggtggtggaatatactatccaggctccatatttaaagctgtagttgaggaagctgcaattgaaactggcaaactggatttaaataaaccaataaaaaatacaggagagtttagtgaggataaactttatgattactgcactccagaaaaggcttttataatatcatcaaatgatgtttttataaacataggacatctagctggatttgataatatatatgatcttagtaaaagacaaggactttttaataaggttttaaactttgatttagagtcggagggaagacttgataataacgattctaatagtgaaggtaatttaagtttgctttcctatggtcaaagtataagaataacgcctatagaagcaattgctatcccaaatactgtaattaatcacggcatatatgtaaagccccatattattgattcatatattgtaaatgataaagtaaaaacaaatcaaatttacagttcaagggttataaaagaaagcactgcaaatataatgaaagagcaatttaagaaggtattaacagataaagatggaacaggtaaacttgcgtatacaaataataaatgcataggaggaaaaacaggaacagcacagagaataaacggacatgatgttaagagtgtggatggatggtttgttggattctttgatttaaagggtgtaaactattcagctgttatatttgtgcctgggatagatgagaaactaagcgcaggctctgaagcagctcctatatttaaaaaaatagtaacggatttaaataaatagggcagctaatttatttctttaaaaaggtaacaaaaattatgtcttgtgaatagtataaattgataggttttctaatttacaaagtaacgagaatacctataacagcgtaggataaatagttttaaccgtaattgtggttaaacttaagttagttttgaaagcattattaggaggattacctgtgtttgtaatgtattgtttatttaatatagtgggaagtatcacattttttgtagcttatattggtaacggtgcatcgtttcctcaaccactttccgaaagtgaagaaaagtattatttaaaaaagttaaaggaaggtgatccccttgcaaaaaacatactcatagaaagaaatttaagacttgtagctcacattgtaaaaaaatattcttattcaggtaaagaagttgatgatttaatatccataggcaccatagggcttataaaggccattgattcatataatgtatcaaaaggtactagacttgcaacctatgctgctagatgcattgaaaatgagatattaatgctcatacgaaataataaaaaaagcaagaatgaggtttatcttcaagatccgataggagtagataaagaggggaatgaaatatcacttatcgatatattgagcagcgatgacgattctgtaattgaaatagttgagaacagaattcaaattggaaaactttatgtagagataaatagagtgctaaaaggacgtgaaaaagcaataattaagatgagatatggtctcggtgatggaaaaccaagaaatcaaagagagatagcacaaatattgggtatatctagatcatatgtttcaagaatagaaaagagggcattaaaaaaattgtataggcaactaaacggaaactgcaaaatataaaaacatgctttgtaacaatataattgtaattatataaaaattaatttataataaaaatgttataaaagttagaacttatggttaaatttctataaaaacattaaaaaataaaaaaataagaaaagacttatttttactaatttatggtaaaatatcttgaatattatgagttttggcctacctttatataaactaagaaaaggctttaaaacttattatattcaggggggttaaatagggaggaatatttataaatgaaaaacttaaaagacttacttaaaatacttgttgaaaaagaaggttcagatcttcatatttctgttaatgttcagccggtaattagaataaatggtgagttaaatgtattaaacgataaaaataagataactaaggatgaagtaaaaaattatgctatgcagctgcttggtgatgactatgataaatatttgaaggcaggagaatttgatgcgtcatacactcttaatggtgttggtatgttcagagttaatgtgtataaggaaagaggaaacgacgccatagctgttaggaatattccatcaaaaattttaagccctaaggaacttgggtttccagatgtttttaatgatttaataaatgctaaaatgggacttgttcttgttacaggaccaacaggaagtggaaaaagtacaacagttgcatcaattataaatgaatttaatttaaatacaaaacgtcacataattacacttgaagatcctatagagtatgtacataagagtaataaaagcttaataaatcaaagggaaatcggaaaagatagtggttcatatgtggcagctttaaaggcggccttaagagaggacccagatgtaatctttgtaggagaaatgagagatatggaaactattactgcggctattacggcagcagagacaggtcatctagtactttcaacattacatactattggtgcggataaaaccatagatagaataatcgatgtatttcctgagcataatcagacgcaagtaagaattcagcttgcctctgttcttaagggagtagtttctcagcagcttttaaagaaaaaggacgagtctggaagaataccagcatttgaaataatgaccttcacaccagctgtacaaaatttaataagggaaggaaaaactcatcaaatacagtctcttattcagacaggaagcaagtacggtatgataactatggataaatgtataatagatttgtataaaaagggaataatatcgtatgaaaccgctgtgcagtcaagtgtagataaagaattcgtgactaaaatgcttatactataaatgaagcgtaaaaattaaataaaagcaagtttgtggtaaaaattttaagttaaaagttaataaatttacaatttcataaaatactatggtatttgataaatttttgtgataaaataactttgtttaggggggatacatagtgaatgaagtaaagtctatactacatgtaatttcacgtgtcttcacaaatacggtttttatcatatcaatgtattatctatgtatatcattctttggtattatacgaaaaaaggatggtaaaaaatttgagcccaaaaaaacctttgcacttgttgtagctgcacataatgaagaagctgtaataagtgatatggttgtgagtttaaataaattggattatcccgatgatatgtatgacatatttgtaattgcagataactgtagtgataacactgctgaaaaggcacgagaaaagggagcaaaggtttacgaaagagtgaacaaagaaaaaagaggtaaaggatatgctctagaatggatgttcagcaaactgtttaaaatggataaaaaatacgatgcagtggtaatatttgatgctgataatttagcctctaaaaattttctcaaagaaatgaataaaaaattatgtgaaggttacaaggttgttcagggatacttagacagtaaaaatcctagagattcatggataacaggaagttattcaatagccttctggtctactgatagaatgtttcaactgtctagaagtaatttaggcctttcaaatcaattaggaggaacaggctgctgctttgaaactgaaattttaaggaaattaggttggggagcaacttgtcttacagaggatttggaatttacatgcaagcttgttttaaatggttataaggtaggttgggctcatgatgcggtaatttatgatgaaaaaccacttacacttgttcaatcttggcatcaaagaataagatggatgcagggattttcagatgtagccagtagatattttttcaagcttttaaaaagcgcaatagtcaatagaagctttgctgcatttgattgtgctatatacagcattaatccgtttatgacaattttatttagtatatcaatgattctaggctttgtagatacatcattagcaactatacataatattccacttgcctttgatactgcaaaaatttttgatataactccattaaaggtatttttatttatagcagcagtatttcagtatgtgtacacaccatttttgttagcactagataaaaagctagacattaaaatgatatggtattatgttataatttatcctatataccttataacatggcttccaataacaattatcggtattcttaagaagaacaataaggattggaatcatacaaagcacacaagaagtgttgatatatcagatttggaaaaagctaactaaagtaaaagtagtatatagaaaaagggtatccctgatatcctttttttatttacaattaaacataagattaaatatttttttaataaataaaagggaattttatttttgtgttgaatatataattgtgcttctctgtgaggggggaattaatgtatgaataattatattataggaatagatgttggttcatccaagatttgtatagcattaggaaagttaacgaaaaaaggagaggtccagataataggagttacatcttcaaaatgcgagggagtaaaaaaatctattgttgttaatatagatagtacagctgaatctataaaaaattgtatggctaaactaaaaaaaatggtggaatttgatttggatgatgtgtacgttgcactccatggaagcataagtgagcttatacataacaaaggtgtggtggctgtatcctcagatgatagagcaataaccagtagtgatgttaaaagggttattgaatctactagatttatatcagttgcatctgatagagagattattggagtggaaccccaacagtttattgtagatggttacgataatataaaagaccctgttggaatgagtgggactaaattagaagctgatgtccatgtcattacggtgaattctaatattgtggacaatcttattaaaagtgtgaataaggcggggtacaatgtaaagggtttgtgttttgaacctaaaattgtttctaatgtagttttaagtaaacacgagagagaaagcggatgtgctcttgtggatgtaggtacagaaaatataaatatagctataattaaaaatgataatatagtgtatattgataatgtaccattaggtggagatagtataacgcatgatatagctcttggattaaagataccttttgaagatgctgaaaatttaaagagaaactatgcgaatattgatgcttctattaataatggtgaaaaaattaacattaaattacctgataatcaaaacttaaaagttgattataatttctttaaattaattgtacaatctagaattgaagaattatatgagcttataaggaagaaattaataagtaagagttattataatgaaataacaaatgtggtagttgtaggtggtggtattgctttagtaaaaggctcaataagtgttggtagaagaatattagataaaaatgtaagagtaggttctccgaattttgtgggagcatccaatcctatatatgcttcagcggttggaattgttagtgatatagggtataatatgaaaagtagtagttttagttatgatgatgaaagttctaaaaatgaaaacaaagattcaaggaataaaaatattaagagagatgaagaagagacaaatatcttttctaaggtaaaggagtttattacagatctcttttaatgagggaggtagtattgtgcttgattttgatgttgatgttcaacagtttgctcaaataaaagtaattggatgtggcggcggaggtaataatgctgttaacagaatgattttggaaggtcttaagaatgtggaatttattgccataaacactgataagcaggcattggctctttcgcaagcatcacagaagatacaaataggtgataagcttactaaagggttaggagcaggagctaatcctgaaataggtcaaaaggctgctgaagaaagtaaggatgaaatatctcaggctataaaaggtgctgatatggtatttataactgctggtatgggtggtggaactggaactggtgcagcacctgtcgttgcagaaatagctaaatccatgggaatattaacagttggagttgttacaaagcctttcccttttgaaggaagaaagagaatgctccatgctgagtcaggaattaaaacactaaaagaaagagttgatactttagttacaattccaaatgaaagattgcttgctattgtagataaaaagacaactttagtagaagcctttaaatcagcagatgatgttttaagacaaggtgttcaaggtatatcagatttgataactattcctggtcttgtaaaccttgattttgcagatgtaagaactgttatgataaacaaaggacttgcacatatgggtactggaagaggtgcaggggacacaagagctagtgatgctgctaaacaggcaatatctagtcctcttttggaaacatctatagttggtgctacaggtgtacttttaaacgtaacaggaggagaagacttaggacttcttgaaataaatgaagcagcaagagttgtacaagaagcagcagatccagatgcaaacataatatttggagctgttatcgatgaaaacttaaaggatgaaataaggataacagttatagcaactggatttgaaagcgaaggagaaaatggagaaataataagaagagaagttaggccagaagtatcagagcctaagtctgagcaggaggcagcaagtgcacttgataatacaggtagctttgatgctccagaaaaagatcttaacatacctgcgtttttaagaagacaaaataaaaataaatattaattttatatgagcatttaacagactgtgaattgaagaaattcatggtctgttttttatttaacattttctgagctttcttaaaaaaaatgatggtaactgtgatataggtaattatattatcaaaaatttaaaattaaaaatttattttcaatagtataaaacgacaaaattttaaaccatcaagtaatataattatttaagaaaggtggaagaaaatggttatttatttggatgttttaatttttgaaaattcaatagtaaatacttttctattgtacataacagctcaaactttaagaataaaggttaaaatgagatatttaatccttgctggaatatttggagggctttacgtaatagttttagttattcctacacttaagatattttcatctttgatatttaaaataatagctgcttttctaatgataattatatgctttaggaaaaaaagtttaagatttaatataaaagcgctggctgtacttattatgtattctatggttacagctggtttatgtttctttattgaattaaataatacaagaggaagctattttaacgccttcattggtaatgtatcttacaagtggattttaatagctattatgattatatatatgtttgtaaatagaattatatggttcataaacgatagaaaattaacacaaagtctaatttatgaaatagaaatatgttttaaggataatagcaaatttataaatgcctttttggatacgggcaatgagcttagagagcctattacaaacttacctgttattgttgttgaaaaagacatggtaagcggtataaagtgggatgattgtccaaagttttatgttccatttagattatttaatggaaaggcaggtaaccttgaagcttttaaaccttcttatgtaaaaatatacataggtgataaagtggaagtaagaaatgcaattatagctttaatagacaataaattaagcagcttaaatgattataatgcactcttatctagaggaagtatttaaaatggggggattttatgaagtttttattgcgccttttaagtaaattattgtgtagaattaaattgttttcaaacagactgtactatataggtggaaatgatgcgcttccgcctcctctttcaaaggatgaagaagatgatttggtaaacaagcttgtaaatggagatgagagtatacgctccatacttatagaaagaaatttaagacttgtagtgtatattgcaagaaaatttgaaaatacaggggttggggttgaagacttgatttcagttggaaccatagggcttattaaagctgtaaatacctttgatccaaccaaaaaaataaagttagcaacatatggttcaagatgtattgaaaatgagatacttatgtatttaagaagaaatagtaaagtaaaagctgaaatttcattttatgaaccactcaatatagactgggatggaaacaagctgcttttatcagatatattaggtactgataatgattgtgtatataatcttatagaaggagaggttgataaacagcttttgttatttgctcttaaaaagttaaacgaaagagaaaaaagaatagttgaattaagatatggacttacaggcgttggagaaaaaactcaaaaggaagttgcagatatgctgggtatatctcaatcctatatttcaaggcttgaaaagagaataattaagagattaaaaaaagaaataaataaaatgttgtgagtttgtctttagtataaaatagctcccctgagggaataatttttaatgctattatttcaaaggggctgataaagtggttataaacaaggttgaaatttgcggcgttaatacatctaaacttcctgttctaaaagaaaaagaaatgcgtgaacttttaatcagtatgaggaatggaaacacaactgccagagaaaaattcataaaaggaaatctgagattagtacttagcgttatccagaggttcaataatagaggtgagaatgcagatgatttatttcaggttgggtgtatagggctaataaagtccatagataactttgatttaagtcagaatgtaaaattttctacttatgcggttccgatgattataggggagataaggagatatttaagagacaataactcaattagagtaagtagatctcttagagacatagcatacagagcactccaagtcagagatagacttataagtaaaaacaataaagaacccactgtttcacaaattgcaaaggaattaaaaatacctcgcgaagaagtgatttttgccttagatgctattcaagatcccatatcgttatttgaaccaatataccatgacgatggtgatgcaatatatgtaatggatcaaataagcgataataaaaatttagatgacagctggcttcaaaatatatcaatcaaagaggctatgaaaaagctaagcgatagagaaaaaatgatacttaatatgaggttttttgatggtagaacacaaatggaagttgcagatgaaataggaatttcacaagcacaggtatctagactcgaaaaaacagcactgaaacatatgaaaaaatatgtttaattaaattaggataaaaaattgatctacttattagaagggcttccaaaggttttaatggaagccctatatacatattagaaacaatagaatttatttagaattttttgcataaggtaagcatatttttatagtataaattcatgcagcttttaaaatttaatttagaagttttatactatagagaggtgagaaaatatggatttaccatcacattcaataaatgctatgaagtccatggaagtaatagatatcaatacaggaacaaaacttgggcttattaaagatttaaaaattgatactgaagaatacaaggttatatcgataatacttcctggttcaaaggtaggaggatggttttcaaaaggaaatgatatagaaatcgattggacagacatacagaaaataggcgtagatgtaatacttgtgaacggtgacaatttatttgtaaataaggattgaacaattaaccctaaaaagtgtataatgaaactaaatatattctttaacgagggatgtgaaggctttgaagtgcccattttgtggatatagtgagagcaaggtagtggattctagatctactgaagacaacatggcaataagaagaagacgtgaatgtcttgaatgtagcaagagatatacaacttatgagaaagtagaagatatacctatattagtaataaaaaaagattcaagtagggaattctttgataaatctaaagtaataaatgggctcataaagtcttgtgaaaagaggcctgtgtctaggcagcaaatagaagatatagcttctgatgtggaaaaatctataagtaatcagatggttacagaagtaaaatcagatgctataggtgaaatggtaatggaaaaacttaaagagatagatgaaattgcttatgtaagatttgcatctgtttatagacaatttaaagatataaacacttttatggaggaaatcttaaaccttgtaaataaaaagtaaaatcgtacatagtgcaagtttaagtaaatgttaaatttatagtgaatattattttttacagttttactttaatcggtatatttcttgacacaaattaatgttaaaattttataaaatgaggaactagaagtatctgttttctttttacccactaaacttagaaaacaaatgttaatttctggttccttgttttgttaaaagcatgttaaaataaggataaaaataatacaaaatttaaaaaagataatataatataggagtagattagtgatgaatataaaaaaagtagataaatacagtttcttagagtttaaagatgataagttttcattatatttttcaactgctgagaatggtttgaattttaatataaacacagaagaaggcaatgataatattagaaatttaaaggattggtttaatgtaaaggatgtggggtatttaaagcagactcacagcgatattattttaaactatgattcggataaagaacttctagagggagatgctttaattacagacaaagacaacactttagtaggagtttttacagcagattgtgttcctgttttattatacgataagtctaagaatgtaatggcagccgttcacagtggatggaagggaacaagtgatatgatagttaaaaagacaattattaagatgaagcaggagtttttatctacggcatcagatataactgtttacataggaccacataataaagcatgctgctatgagtttggagaagaggctctaagtgaatttgaaggcagcggtatttatgatattagtgagatttataaagatggaaagttagatctagaaaaatgcatagtaaagcagtgtaaaagtgaaaatgtgaataatataaaatgcttaaacatatgtacaaattgctctaaagaatataagatgttttcttatagacgtgatggcaaaagtgcagggaggatgttttcttttataataaaaaaataatatgtggctggagggataatatggcaggcgaaaaaatacttgttgtagatgatgaggagcatatagtcaagcttataaaatttaaccttgaaaacaatggatataaggttattacggcagcagatggtggtgaagcactagaaaaggcaaagggagaagtgcctcaactggttcttctagatttaatgcttccagttatggatggctacgatgtttgtagagaaatacgaagggatcaatccatttcaaacatgcctgtaattatgataacagcaaagggagaagaattggacaaaatattaggcttggagcttggagcagatgattatataactaaacctttttcagttagagaattagttgcaagggtgaaggcagtattaagaaggactaaggttgattatatagataaaacttttaaatttggtaatattcaaatagattttcaaaggcataatgttaccaaagagggagaaaaggtagagcttacccttaaggaatttgaacttcttcaagtacttataaagaataagggcagagtaatgacaagggattttttacttgataaaatatggggatatgaatacattggagaaacacgtacggtagatgttcacgtgaggcatttaaggcaaaaaattgaagatgatgataaaaatccaaaatatatagaaactataagaggaatagggtatagatttaactatagtggtgattaaagtgaaaaagaaacttgtattgtacaatttgggtattttaataataactcttataatgataactgtattatttataaaaatcgaggattatgaatataggcaaaatacagagcaggatcttaaaagaacaaataatgtagtttccaatgtaattgatatgaacaaaggaaaagatatttcaagtgctcttaaagtcgtaataaaaaattcagatataagagtaacatatataaataaaaatggagtagttttatatgacaatgatataaatgcagaaaagcttgataatcacaacaagagagtggaagttgcagaggcaagaaaaaatggatatggttacagtgtaaggtatagtaaatctttaaaaaacaatataatttattatgcaaaggtcagaggagacggcactgtagtaagaactgctgtagagctttcctctgttgaaaggtttgaagcaagatacttaaagttctatatttatgtaatagctctaagtatcatagcggcagtatatttatcttttaagctttcttatgttattttaaatccaataagggaacttcaaaatacaagctctaggattgcaatgggagaactggaaacaagggttaatgttgaatcaagggatgaaataggtcagcttggaaaaacctttaataacatggcaggaagacttcaatctacaataagagaatctgttgaaaaacaaaaaaagcttgaggctatacttgttagtatggacagtggagttatagcagttgatagaaagcataaaataataatgataaatccatatgcagaaaaaatatttggcatagataaaaatataataggacaaagcctaatggactgtataagaaattatgaatttgaggacatatttaataaaagagcggaaggatatgcagaaataaaaacctcatggccaaaagagagaaatcttagaatcaaaactgccgatataataaatggatatgaatgcattggaactgttgctgtggttcaggatataacagatattagaaaacttgaaaacatgagaacgcagtttgtagcaaatgtatcccatgagcttaaaacaccactgacatcaataaaaggctttgctgaaaccttaagatatgttgaggatgacaatcaaaaaggagaatttcttgatattattgatgatgaagtagatagactaactagactcataagtgatatattaacactttcagatatagaaatcagaccgtttatgaaaaaagaagagtttgatgtcaatgaaataataaaagctgtctgtggacttttagaaaaatcagcctctcgtaagaatataagcttaaaagtatttggagaggatgtacctaatttaattggggataacgataagtttaaacaaatgattataaatttggttgacaatgctataaagtatacagaagctggtggagaggtatcggtatataagaagtatacaaaagatgatgttattatatccgtcaaggataacggtgtaggcataccgaaggagcatcttcaaagaatatttgaaagattttatagagttgataaggctcgttcaagagcaaatggaggaactggtcttgggcttgccatagtaaagcatatagtactgaattttaacggcagcataaatattgaaagtaagttaggtgttggaactgaatttattatcacaataccttataaatagtttaaaagagcttctttaaatttttaaagaggctctttttttaacaaacatttaaaattacataaattagatataatcttctttacttattatagatgtataaacaaacttattgtaaaggagatactatatgaattttacattgatgaaaaaaatgaagaaagaaaaaagggtttcaatagcttacagaatagcatttatagtgacaggattaataatttccattatggcagcagcagacggcatcatttattatgaagcttacacaaatatctataaaataaataaaagcaatatgaaagtggtttcctctgaaatatacaataattttaaaaacttagtatcacttcaagataatgaggcgaaaaatttatcggaggactcttacttaagaaaaatagtcacctataataaaaatatttccacagatgaaatgagtatgctaaaaaataaacttaaaggtgacagcgacaaagaagttgaaaatatattttttgcaggtcagttatgacaagcaaacctgttataacatttgcaaatccaataaaagatgacgatgggaatacattaggtgtagttggtaaaactatttttgtagactatttctcaaaaagatttgacagttttaagtatatgggaaatagtacaaagcttctttcgttaaatgcagctattgaagctagtagattgggagaagagggaaaaggctttggtgttgtggcgtccgagattaaaaagctgtctaacaatgttgaaactcaaattgtaaatataggggaaatagtagcgcaaatcaatgaaaaaatagttaacatgaaagataagatgacgtctcttaatcgtgattataaagattaaatagctgctgttaaaaatactaaaacaaattataataatgtattttctctaattcaagaaataaataataatataaagtatgttgatgaaaatgcaaactatgtaagttctcaaaataaaaatatataccatgaatttaaaaacataagtgcattttatgatgaatttaatacatcaatagagctggaagaaaacataggtaagtttagattgtaaagatcaatgttaaatttaattaacattagtataatactcaattaacattaaaaatgtaacatgttaactgtaaagaggagaggaacctagttattaggttttgaatttagttaccaatctatatatctatactttggaggtattttaaatgaaaagtaaaaaaatcaaattaatgtctgtagctataacaatgacaattatggctggtttatttgtaggatgtggaaattcaaattcaagcagcaataaaagtagttcttcaactacgaagaaggtctctggatcaattacactttcaggatctacagcacttcaaccattggcagaaaaatctgtagatggttttaaagaaaaatatcccgatgtgagtgttaatgttcaaggaggaggaagtggtactggattaaaccaggtgcttcaaggagcagttgaagtgggaaattcagatatctttgcagaagaaaaattaaatgcagatgatgcaaaaaaattaacagatcataaagtatgtgcaataggctttgctgtagttactaacaacgatgtaaatgtaaagaatttaacaaaacagcaggttcaagatatatttactggtaagataacaaactggaatcaagttggtggaccaagtgaagcaataaacatagttcacagacctaaatcctctggaacaagagcaactttcactaaaacagttatggatggaaaagacgaaaaagatgatattggaactacacaggacgccagtggatcagttaaaactgcaatgacaagtgcaaaaggttctataagttacttagcattttcttatcttgtaacagatgagggtaaaaaagatataaatattctatcattagatggagtagaggctacttcaaagaatgtagaaaatggtacttatcctttctggtcatatgagcatatgtacacaaaaggtaaaggaaatgatgcagctaaagcatttatagattatatgatgagttcagataataaagccttaattgaaaaaatgggatatatatcagcatctaatataaagaaatagttaagatacataattgtaccacaatattaaaaacagtattatggtgcaattatcattttaaatttaaataatataaaaacttaaattgaggtaaagctatggaaaaaagaagttttcttaaaaaactcaaaacagaatatgttggaaggggatttgctactatttgtggagtttttatagttattttaaccctttcaattattttttttattgcatctaaaggcatatcaacatttaccaaaaggcattattctatttttgattttttaatgtcaagtacatggaaaccagatagtaaaactcctaagcttggagcatttatattcctagaaggatctacaatggtatcaattggagcggtaattttaagtacacctatggcaattgctttagctgtatttatgaatattatatcacctaagcttggagatagagtattaaagccttcattagagctctttgttggaattccatctgtagtttatggatggattggggtaacggttttagttccttttataaaaaatcattttggaggagttggcttcagcttaggtgctggaattttagttctcagcataatgattttgcctacaattgcaagtctatcttcagatgctataaaaaatgtacacaatgaatatatcgaaggctcatacggattaggtgccacaagatggcaaacaatatataaaataataataccatcaagtaaaaatggaatacttacaggaattgttttgggacttgcaagggcttttggagaggcattagcagttcaaatggtaataggtaatacagtaaaatcagctcaaggacttttttctcctactaccactttgacaagcgtacttacaatggatatggctaatactccaaatggaactgcatggaatgatgcactttggtctcttgcgtttttacttcttgtaatttcgtttatatttatagtaattataagatttatagggagaaaaggtgaggtttaatgaaatctaaactatacgataagatagcaacaataattttatacttgatttctttatttgtagttatactgcttgcagcctttataatttttataatttataggggccgtgattccttgaatttgagttttttatttggcaatcctaaaatagcggaaaagggcggcggtataggtccagaactttttaattctttttatatgcttatagtgtctcttcttataacagtaccaattggtataggtgcgggtatttatatgtctgaatatgcaaaggaaggcaggatattaaattttataaggctgtgcatagaaacaatggcatcactgccctctatagttgttggtttatttggtttgttagtatttgtaacaatgacgcattggggttatacaattttatcgggagcgcttgtcataaccattttaaatttgccatcaatgacaagggtatcagaaaatgcaataagggcatcttcctctaaggttaaggaggcgagccttggactcggagctactaattggcagacaataaaaaatatagtacttccctctgccatgccggagatattaacaggtataattttatccgcaggtagaatttttggagaagctgctgcacttttatatacagcaggaatgagtgctccaaatcttaatttcgatacaataagcttggttgataagacttcagctttcagtttgtttagaccagctgaaactttggctgttcatatatggaaattaaactcagaaggtatgattccagatgccacaaagattgctaatggttcttctgctgtactggtactaatggtgctgttatttaattttatggcaagaatcataggaagaaagatatatagtttatacagcggtaagtaaggaggagaaaaatgggcataatacaaactaaggacttaaatttatattatggaaatgttcaggcattaaaaaagataaaccttgatttcagtgctaatacggtaactgcacttataggaccgtctggctgcggaaagtcgacttttttaagaacaataaatagaatgaatgatttaataagcactgttaaaatagacggtgaggtaatgtttgagggaaaagatgtatataaggattatgatgagatagagcttagaaaaagagtaggtatggtatttcaaaagccaaatccatttcctatgtctatatatgataatgtagcctatggtcctagaatacatggaataaaaaataagggtaaattagacgaaattgtggaaagaagcttaaaaggctctgcactttgggaagaagttaaggatagattgaaaaagagtgcacttggtctttcaggaggacagcagcaaagattatgtattgctagaacacttgcagttgaaccagaagttcttcttatggatgaacctacatcggcactggatccaatatcaacacttaaaatagaagaactaatggatgaattaaaacataagtatacagtaattatagtaacccataatatgcagcaggcaggaagaatatctgataatacggctttctttttaaatggtgaagttgtagaaaatggaaaaacagaggatattttttataaaccaaaggataaaagaactgaggactatataacaggaagattcggataggcttttaaaatttatttgtggggtgtaaaaaatgacaagaaaaatctttgaatctgatttagaagagcttcactctgaacttttaagaatgggcagcatggcagaaaaacagatctatgattgtatggaagctttagagaaacaagatgaaaatatggctgaagtaattataaaaaaagatgacataatagatgatatgcaaaaggaaatagaaaacaaggttataagacttatagcaatgcagcagccaatagttgctgaggatttgagaaatatatttactactgtaaaaatagtaacagaccttgaaagattaggagatcatgctgtagatatagcaaaagccataaaaagattaaatggtgaaaaacaccatgatatagtaaaagagatatggaacatggggaataaagttaagtcaatgataaaggattccttggacgcttatgtggagaggaatttagataaagcctatgaagtctgtaagagagacgacgatgttgattctttatataagagaattttcaatgaacttctaaatataatgagcgaggataaaagcaaggtaaatcagcttactcaatttttatttgtttgtaaataccttgagagaatcggagataggaccactaacgtgtgtgaaagcactatataccttattacaggtaagcaggtggatcttaacgattaaatcttatgcatgactgttctaatttgattgtggataatttatttaaatctactaatcataagaacagttattttttattttatggcaaatgcttgtattcttgacttaaaagacttaataatgtaatataactaaagagtttaaatatgtgaacactattattgtagggagtaattatggaaaataaaattgttaaaattgagcctcaaagcatagcggaagaaatgggcattgaggttggagatagtcttataagtataaatggtaaagaagtaaaagatataatagattatagatttttaatggcagatgaatatgttgttgtaaaaatacaaaaaactaataaagaaatatgggaacttgaaatagaaaaagaatatgatgagaagctgggagtggaatttgaaagtggaattttagattctgcaaaaagctgtagaaataagtgtatattttgttttatagatcagcttcctaaaggaatgagaaaaacactttattttaaggatgatgactccagactttcgtttttgcagggaaactttgtaactctcacaaatatgagtgatgatgatatagataggataataaagtataggataagtccaataaatatatcagttcaaacaacaaatcctgaattgagaaaaaaaatgctaaacaataaatttgcaggaaacctaatggagaggatgaaaaaactctctaatgcaggtataacaatgaactgtcaagttgttctatgtcctggaataaatagtggagaagaattttcaaaaacggttaatgatctttataaactctatccttctgttaaaaatatagcaggagtgccagttggaataacatcttacagagaaggactttttaacatggttccatatgattctcaaagtgccttaaaggagatagaaaatataaaacctatacaagaaaaattcataaaagaaattggcagtccttttgtaaggctttcagatgaattttatgtattatcaggcataccaattcccaaggcagagttctatggagagtttgaacaatttgaagatggaataggtatgatacgtacttttagggataacataaatatgtctttagataatctaaaagatggtatacataagtcctttaccatggttacaggagttttagcctatgaagaaatagaaaatgcagctaaaatgcttatggaaaaaagcagagggttaaaaataaatgttataaaagtaataaatgagttttttggtgaaaagataactgtagcgggactactgacaggaagagatattttaaactatctaaaaagaaatgaagttggcgattacataattcttccgtccaatatgctcaaaagtgatgaagatgtatttttagatgatgttaaagttttagatattgaaaaagagttaaataaaaaagttcttgtttgtaattattcaggcgaagacttagtggatataataaataaaaatggcagggaggaataaaaatggctaaaccattagttacaatagttggaagacctaatgttggaaaatcaactttatttaataagcttgctggaaaaagagtttcaattgttgaggatactccaggagttacaagagacagaatatacgctgaatcagagtgggtaggaaagaaatttactataatagatacaggtggaattgagcctgaaaacaatgacataatacttacacaaatgagaagacaggcacagatagcaattgaaatgtctgatgttatcatatttatggtggacggtaagcagggacttacagatacggataatgaagttgcgataatgcttagaaaaagtaaaaaacctatagttttagttgtaaataaaattgataaaaatgttgaagaaaataatatatacgaattttataatctcggcataggagatcctgtttccatatcatcatcacagggacttggcataggagatatgcttgatgaggttgttaacaaatttaaatctgaaggagaagatgaagaagaagaagaatatataaagattgcttttgttggaaaacctaatgttggaaaatcatctcttacaaataggattttaggagaggaaagggttattgtaagtgatatacctggaactactagagatgctattgatagttttcttgaaacagactttggtaaattagttcttatagacacagcaggacttagaagaaaaagcagaataaaagaagaaatagaaagatatagtgcagtaagaacaatggcagctattgaaagatgtgatgtttgcactcttatccttgatgcaactgaacctattagtgagcaagacgaaaggataataggctatgcacatgaaaacaataaggcaattttagttattgttaataagtgggatttaatagaaaaagatgataaaaccatggaaaacttcaaaaagaatctagagatgaaattttcatttatggcatatgcaccattcttgtttatatcagcaaaaacaggtcaaagagtacataaggttctttctgagataaaaaaatgctatgacaattacagcaaaagaattgctactggagttttaaatgatgttataagtaatgctgtacttatgaaggaacctccagttgtggcatttaagagacttaagattttttacgttacacaaacggatataaaacccccaacttttatattctttgtaaataatcctgagctccttcacttctcctacaggagatacttagaaaataaattaaggcagagctttgattttgagggaacaggaataaagatgatatttaaggaaaggaagaactaatatggggggagtaacattcataggaggaggaagctttggtacagcacttgcaataatgcttgctaaaaaaggtcataatgttgtgatttgggatagaaataaagaaattcttgaagatataaatacattaagaactaatacaagatatcttccaaacaacataataccctgctgcgttaaagcagtagatgatattgagaaggcagctaaggaaagcaaatatattgttcttgctgtcccatcttttgctataagggaagtatgcaggaaaataaagggctttttaagagaagaccaaataattataagtattgcaaaaggcatggaagaagagaccaagaagaggctgtctgaagtagttaaagaagaactttataaaaatcctgttgtagtactttctggtcctagtcatgcagaagaagttgcaaatgatattccaactacagtagtggttacttccacagatatgaaatatgcagaagaagttcaagatgtttttatgactaacagttttagggtgtacacaaatagtgatattgtaggcgttgaaataggaggagcagttaaaaatataattgctctagcatctggaataggtgatggaataggttatggtgacaacacaaaagcggcgcttatgacaagaggtatgagtgaaataatgagaataggcgtaaagcttggaggtaagccagaaactttttttggacttacaggcatgggtgaccttatagttacatgtactagtatgcacagtagaaatagaaaggctggtatactaataggtagggggatgtcatgtagggaagcatgtgataaaataggaatggtagtagaaggcgttaaagcgtgtcacaccttttatgaattaaaagaatccttaggtgtatctatgccaattaccacttcactttataaggttctatttgagaatggagatcctaaaaaagaagtgtatgagcttatggcaagagataaaaagaacgagtactatttttaattaatttactcttataggaataaacaagctgccctctgtatatatatatattgttaatattaaggtgtgggaggaagcagcgtggaaaactttaatatatataaagacattgccgaaagaacggatggggatatctatgtcggggttgtaggacctgttagaacaggtaaatctacatttattaaaagatttatggatactatggtaatacccaatatagacaatccgcataagaaggagagagcaaaagacgaactccctcaaagttcatcggggaaaacaattcatactacggaacctaagtttgttcctaatgaggcggtagacataagtttaagtgaaggtataaaattaaaagtgagattagtagattgcgttggatatatagttaagagtgcacttggatacgcagaagctgataaacctaaaatggtttcaacgccgtggtttgatcacgaaataccttttgaaaaagcagcagaaataggaacaaaaaaggttattgatgaacattctactataggtcttgtggtaactactgatggttcaataacaggtataccacgagaagattatgtagaagcagaagaaagagtagttaaagaacttaaggaaataaaaaaaccatttgtaattatattaaattcatcacaggtggatgatcctaagacaattgaacttagagacgaattggaaaaaaagtatgatgtttctgtacaagttttggatgttcaaaatatggttgaagaagatataataaaagttttcagtaaaatattaagggaatttcctgtaagagaaataaacatagatatgccagaatggattgaaaagctaagcacaaagcattggcttaaggataactttatgaatatcataaaagaaatatgtatcaaagtaaataaggtaagagatatttcaaaaattgtggcctcctattctggtatggattacttagacaaagctgatatgacagagatggatatgggaagtggcgtagggagaatagttttcacacctaaaagagatatgttttataaggtgcttagtgaagaatgtgaatgtgatattgatggagaaaataagctcttatcaataatgaaggaaatgcatgaagcaaaggtacagtatgataggatatcagaggctttgaaggatgtaagggaaaaggggtatggacttgtagctcctcagcttacagaaatgaagcttgaagaacctaagatagtaaagagtggtgctagatatgaggtcaaacttaaagctagtgctccaagtttccactttataagggcagatatagaaactgaggtttctccaataatgggaagcgaaagggaaagtgaagaacttgtaaggtctcttcttgaacaatttgaaaatgatccatctgaaatatgggaaagcaacatgtttggaaaatcattagaagtacttgttaaagaaggtcttcaaaagaaactttacaaaatgcctgatgatgttcaggcaaaaatacagaaaacacttgagaaaataatcaatgaaggtaatggcgggttaatctgtataatactttgattttatttgtttgaaaggggatttctttttataaaaagggaaatcctcttaattataggttataatatgtattttttaatttattatctaaagagaggaagaagcatatgaagaaagttgcagtgatatttaatggtggtactatatctatgaagtttgattcaagggtaaaggcagcagttccagctttgtctggagaagaaataatgtctatggtaacaggaatagaaaaatttgctgaaattgagtcctttaacttttcggaggaaccaggacctcatatgacacctgagaaaatgatggaattatctaatttcataaaggatattttaaaaagagatgatattgtaggagcagtagttacacatggtacagactcacttgaggagacagcatatttcctagacttaaccataaaaaatgaaaaacctgtggttgtaactggttccatgagaaatagttctgaacttggatatgatggtccagccaatctttctgctgctatatgtacagcaatatcagaagaatcaaggaataaaggagtactagtatgcttcagcgatgaacttaacagcgcttctgaagttacaaaggtacattctatgcatcttaatgctttcgagagtccggattttggaccacttggaatagttgatactaataagcccatattttacagggataaagtttataatgattacatagaaacaagcagcgtagaatctaaagtggctttaataaaaacagctgtaggaatgaattctgattttatagattttgcagttgaaaaaggctataaaggaattgtaattgaagctatgggaagaggtaatgtacctccttatatggtagaaggcattgaaagggctctcaagaaaaatgtgcctgttgttcttgtctcacgatgctataaaggaagagttcttgattcctatgggtatcatggtggaggaaaagaacttagaaatataggagtaatttttggagataatcttcctggtcaaaaggcaagaataaagcttatgcttgcacttggaaagacaaaagatcttgaaaaaataagaaatatatttgaagaggatttctacaggatatataaataatactaaaaagtaacaatagtgagctccatgaatacattatattattgggaaactaggtagaatattaagttgtactttagtttccttatataatggtagtggaggagttatatgattaaaataaataacagacttaaatccatagatgagtaccatttcaagaaaatagaggataaaaaaagagagttaattaaaaaaggaaaacaaataatagatcttggaattggtgatcctgatcttgaagtaagtaatagagttcaaaatgaaataataaaatcccttggaattaaagattttaataaatatccaccatacagcggaatagagaagcttaaatcaagagttataaaatactatagggatatttttcaggttaatttagatttagatgaaattataattacaataggatcaaaggagggtataagcagtataataccttcaatttgtgatataggtgattatgtaatagttccaaatccaggctatcaggtatatacagcagcgtcatatttgtggggtgctgttccatataaaatcccattaacagataagaatgattatttaccaaacttaaatgttataccccaaaatatagcacttaaaagcaaactatttttcattaattatcctaataatcctacaggagcggaggctaataaagacttttttaaagatatagttgagttttgcaaaaaaagaaatatagttttggttaacgattcagcatataatgagataataaaaaaggagagtacgccaattagcttgcttcaaagtgatgaggataaaaaaatgattgaaatagggagtttctccaagacctataatatgactggatttagagttggatatgtggttggcaataaaggagtaataaaggctcttctaaaggttaaaagcaatattgattcagggcaattcatgccagttcagtatgcggctgctgaggctattaacttagatagaaatgaaataaaaaaatcaagagagatatatgataaaaggagaagtacagcaaaaaaaatacttagtaaaaagggaataaaatattttgatgccagtgcagccttttatatttggtgcagtgttccaaagggatacagcacagatgaattttgtgacaaacttttaagtgaatacggtgttgttgtaactccaggatattgttttggaaatttaggatacgggttttttagaatagcgctgacaactaaaatcgaaaatattgaaacagcattgagtaaatttgaagattttcaatgaaaatgtaacttttaaaggaaaaaatactataaaacaataaaaaatgtggtataattgagtttgttataaaaagaatctgtttttacttgctacattgtgtataattattattgtaatattatacatgtttttacttatggaaggatgaggacaatgataagaagcatgacgggatttggtagggcttctaacgataatggcagacttggatttaatgttgaaattaagagtgtaaatcacagatattttgatttaaatataaagttacctagaaatcttatctcacttgaagaaaagataagaaaagaagtaggaaacaaaataaaaagaggtaaggtagatatatttataactcaaaatgtctatgatagcagtactactaatgtaaatttgaataaaggtcttgcttataattattgtgaatgtctaaaacaaataagagatgattttaatgtattagatgatatatctgtttcattgatatcaaaattccccgacgtaattactgtgacacaaaatgaggaggatttagatgaaatttctagcctacttttgaagcctattaacgaggcagttgatactatgttaagtatgagggaaaaagaaggggctaggcttaaggaagatatagaaggtaaattaactaatattgaagagttactagtgaatgtagaaaagagagctccttacacagtagagaattatagaaataagcttgaagaaagaataaaagatttacttgtcgataatcaagtagatgaagctaaacttgcaatggaggtgacaatttttgccgacaaatcatgtatagatgaagaaatagttaggcttaaaagtcatatatctcaatttaagagtactcttagcaagaatgaaccagtgggaagaaaattggattttatagttcacgagatgaatagggaagctaacacgataaattctaaatcaaatgatatcgatatagttcactgtgtccttgatataaaaaacgaaatagaaaaaataagagaacaaattcaaaatatagagtgattttaggaggataaaattatggatataaaattaataaacataggttttggaaatatagtttcagcaaataggttagttgcaatagttagtccagaatcagcaccaataaagagaataatacaggaagcaagagatagaggaatgctaatagatgcaacttacggaagaagaacaagagctgtaataataacagatagtgaccatgtaatactatcagcagtacaacctgaaaccgtagcacatagattatctacaaaagatgatggaactaatacagtagatgaggtagaagagtaatgtctaaaaagggattattgattgttatttcaggcccttcaggtgctggtaaaggaaccatttgtaaggctcttatgaaagaacaacaattttggttgtcggtttcagcaactactagagagccaagagaaaaagaagttgaaggtaaaagttattattttttgacagtagatgaatttaagagtaaaatatctgaagatggttttttggaatatgcagaagtatacggtaattactatggaacacctaagaaaagcgtatgtgagaaaatagataatggtgaaaatgtaattcttgaaatagatatccaaggagctcttaaagttaaagaaaattatcctgaaggagtattcatatttatacttccaccttctatggaggaactcaagaagaggataataggcaggggaagcgagacagaaaagtcacttatgaccagatttaaatctgcgtataaagagataaattatgtatcaaaatacaactatgctattataaatgatacagttgaaaatgccgttacaaaaattaacagcattatagtagcagaaaaatgtagggtagatagaataaaagataatataattgattctaaggagggtaaaattcatgaacaattctatgattagtccatctgttgtagacttaaaggcaaagacaggtgatagatattctcttgttgttataacttctaagagagcaagacaaataattgcgggagaggagcctcttgtagatatagagagcaataaggcacttactattgcaataaatgaagttgatcaagataaaataaaatttgatctaccaattgaaggaataaactaaaatggaagttaagaatgtagtcattggtgtaagcggaggaatagcagtatataaagcacttgatgttataagccgtttaaaaaaagcagactttggagtagatgttataatgacgaattcagcttctaagtttgtaacaccattaagttttcaaagtttaagtggaaataaagttataaatgatatgttcgaagaaccaaaatcatgggaaattcagcacatatctttggcaaagaaagctgatatattagttgtggtaccagctacagcaaatataataggcaaggttgcaaatggaatagctgatgacatgctttctacaactataatggcagcatatggtagatgccctattgtatttgctcctgcaatgaataccaatatgtataaaaatcctattgttcaaaataacataaaaaaattaaaggattatgggtatatttttatagaacctgaaaagggaagattggcatgcggggatgttggagaaggaaagcttgctgatacagaacttatttatgaaaatatcaaaagtcttttatataataaaagggatttagctggcaaaaaagttatggttacagcaggtcctactatagcgccaattgatcctgtacgatttataaccaatcattctacaggtaaaatgggatatgctattgctgaagaagcaagagatagaggtgctgaggttacacttataagtggagaaacaagcctaaaacctccttttggtgttgattttattaaagtgtccaccaattctgagatgatggagaaggttttagaaaaatttagcggcagcgatatagtcataaaatcagcagcagtagctgattataaagctaaaaattacagtgaattaaaaattaaaaaagccagtgataatttaaatatagaatttgtaaaagacaatgatatactaaaaaaattaggtgagattaaaaaacaccagattttagttggttttgcagcagaaagcaatgatttaattgaaaatgcttatggcaaattaactagaaaaaatttagattacatagtagcaaatgatattttatcgaaggatgcaggatttgctagtgatgaaaatagagttgtcatattgggcagtgatggaagcaaacttgagctagataaaatgtccaaaagaaaagttgcagagaatttgtttgatttattaagtaaaaagcgcagttagcgctttttcttgttaaagggtgatatagtgtataattttgcaggcattataataaataatgaagttgcatcacttgatagaatttttacttatgaaattccagaagaattaaaggaaagcataaaagtaggtcagcttgttaaggtaccttttggaaactcaaataaaagactttatggttttgtctttgatcttaagcttgaaaatcaaggcaaaattaaattgaagaagatagcatctatagaaagtgatgagcctcttataacagataaagatatgcagctaattgaaaatatgaaaaagaagtatttgtgtacctatatcgaatgtataaggcttataatacctactggaattatgaagggtatgaagccaaaaacaacagatgtagtttttttaaacggcagtttgcctgataacctaaaaaaggataagtatgaaagcatatataaaatagtagaacaaaataatggtatgtataatagaagccaattaagcaagaaattcaatatttcagtatcctccattaatactatgataaaatatggagcattaactatatcagaaaaggttttaacaagatatgacagcagggtatatgatgtatatggtgaaaaaaagcttaatgattttcaagaagatgctgttaatacaatactgtattcgaataaaagaaaatttttaattcatggtgttactggaagtggaaagacggaaatatacatgcatctagtaaaaaagatgattgaggataataagcagtcgattatcttagttcctgaaatttctcttacacctcagatgatagaaagatttaagggaagatttgggctaaatgttgctgtttttcacagtaagctttcagatggagaaagatatgatgaatggattagagtaaaaaatggtgaggttaaggtagctgttggagctagatccgcactttttttaccatttgataagttgggtttaattgtaatagatgaagaacatgaaggcagttacaaatcagaaagtgatcctaagtacaatgcaatagaagttgctgaaatgaaaagtgcaatagaagattgtattcttgttttgggatcggcaactccggctgtagaaacctattataaaaccttaaaggaagattatgatctgataacactaaaaaacagggctgatggtgctcttatgccagaagtatcagttgttgatatgagagaagaattaagagaaaacaataaatctatatttagcagagccttgtatgaaagcattttagagacgcttgagagaaaagaacaaattatactttttctcaataggagaggatattcaacctttgtttcctgtagaaaatgtggttatgtttttaagtgcaaaaattgcgatgtttcaatgacttatcacaataataagggatatctgatatgccactactgcggaagcactcaaagaattccttcagtgtgtcctaagtgcggtagcaagtatgttaagtattttggagcaggaacagagaggatagaaagagagataaaaaggctttttccaaatgcaagaactgtaagaatggatagggatactaccgtaaaaaaagattcctatgaaagaatatataatggcttcaagaacaaagaatatgatattttgataggtactcaaatgattgctaagggactagattttaaggatgttactttagttggagtagtagctgcggatctcaccttgaatttgccagattacagggcaggggaaagaacttttcaactcctgtgtcaggttagtggaagagcaggcagaggcagtaaaaaaggtaaagtagtaattcaaacctattcaccggaaagctatgctataagattttcatctacaaacgattatagaagcttttttaaagaggaaattaaattaagacatgacatggattatccaccttttaataaactacttcttctaaattttagttctaaaaatgaacaattgttaataaaaaatatacaaatagttggtgattttttaaaaaataaagcaaaggaatatagtaatatttatgtattaggtccatgcccatcgccaatatccaaaatcaatgaagcctatagatggcaaattgtattaaaaggcgatataacttatgaagtagcctgctttataaaaaaatctatttatgaattgttaaaaaaagtttataataatataagagtttcattagatataaacccattgagtttattataatattttggaggtaatgtaatggcaatacgtagtataagaaagtatggggacgaattattaagaaaaaaaagtagaaaagtagaaaagatagataagagattattaactcttatagatgatatgtttgaaaccatgtataatgcagatggagtaggtcttgcagctccacaggttggtatattaaaaagacttgtagtaatagatgtaggagaaggtcctgttgtactaataaatcctgaaatattagagacaagtggaaaagctgtagatgtagaaggctgcctaagtattccagaaagacaaggagaagttgaaagaccaacatatgttaaggcaaaagctctaaatgaaaaaggagaagaaattgtaattgaagcagaagatttatttgcaagagctatatgccatgaaacagatcatttaaatggagttttatttgtagataaattagctgaaagtgagggaaattaattgttgaaaattgtgtttatgggaacaccggaattttcagtaccctcccttgagaaacttatagaaaattatgatgtaagggctgttttgacgcagccagataagcctaagggacgtgggaaaaagctagctatgtctgaggttaaagaagtagcagttaaaaacaatattccagtgtttcaaccagttaaattaaaaaatgatattgaagttataaataaattaaaagaaatagcaccagattttatagtagttgtggcatttggtcaaattttatcaaaggaagttcttgatatacctaagtatgcatgtataaatctgcatgcatctcttttgccaaattatagaggcgctgcacctataaattgggcaattataaatggagaaacaaagacaggaaatacaactatgattatggctgaaggattggatacaggtgatatgcttcttaaggatgaagttgatataaaaagagatatgacagcaggtgaacttcatgatattttgatgaatagaggagcagatcttcttgtaaaaaccatagatgaattttcaaaaggaaacattaaaccagaaaaacaaggtgagccagaaacggattatgctgctatgttatccaaggatactggaaaaataaattggaatgataaaagcgaaagaatatataaccttataagaggattaaacccatggcctcttgcgtattctagttataatgataaggttatgaaaattcacgaagctaaaatattagatgctgcacctgaaggagaaccaggtcttataactaatgtagataacaatggaatagaagttaattcatcagatggaaagattttaattacaaaaattcagtttccaggtaaaaaatctatgaatgttggggaatatataagaggaaacaatattgataagggagttattttaaagtaaaaggttaggaggttttataatgccgttctattttgatcctagttttataatactgataccagctttaataatatcttttgcagcacaatcacaaataagctctacctttaacaaatattcaaaggtaattgggttaaatggctatactggagcagatgttgccaggatgcttttaaattcaaatggtcttagtgatattccagtagagatcataccgggaaagttaacagatcattatgatcctaaaaatagagttatgagactttctgaggaggtttattatgggacttctgttgcttcaattggtgtagcagctcatgagactggtcacgcttttcagcataaagcgcattatgcccctcttgaaatcagaaacactatagtgccagctgtaaacataagttctaatgcttcttgggttttgttctttttaggaattgtgtttggtataccggcatttgccaaaataggagtagctctttttgcagcagtggtgctttttaatttgataacgcttcctgttgaatttgatgcttcttcaagggcacttaaacttctagaaaataagggaatactttatcataacgagattaaaggtgcacgtgctgttctaaatgcagcagcaatgacatatgttgcagccgctctcatggcgatttctcaacttataagacttataataataagtaggaatagagattaaaaaggaatgaaaatatgaataatacgagaaaaattgttcttgatgttttaaataaagttctttctcatgatggattttcaaatatagtattaaataaggcattaaaaggcgaggaaatatcatctaaagataaaggtcttgtaacagaaatagtatatggtactataaaatataaatatagtattgatattataataagtaagtttgtaaagacaaaaataaataaaatagataaaagagttcttaatgttttaaggatgtctatatatcaaatcaggtatcttgataaaattccagattttgctgctgtaaatgaagcagtgaatatcactaaaaaatacatatccttaaaatcatctaaatttgtaaatgctgttcttagaaattatcttagaaatcctaacattgccttttataataaagataattctgtagagaagctttgctttaattactcttttgaaccgtggatggtaaagttttttttaaagcagtataagaataaagcagaagaaattctaaaaggacttaatgaaaatccttctattactataagagtgaataggttaaaaacatcacataaagaattatggaatgaacttgaaaagcttgattataatattgaagaagggtacattttaaaagatgccataaggattaaaaaaggccacagcatcgaaaataatcctctatttgtcaggggagagtttactgttcaagatgaaagtgctatgttagtatcagagtgcatggatattaaagaaaatcttgtaatatttgatatgtgcagtgctcctggaggaaaaactacacatatgggagaattgcttaaaaatactggtacaatatatgcttttgatttacatgaaagtaagataaaattaataaatgaaaatgctaagaggctaggagtagaaaatataaatgcttcagttttagatgccagttcttatcatgatgattttgtaaataaggctgataggatattagtagatgcaccctgctctggtcttggcataataagaaaaaaacctgagataaagtggaataaaaatattaaagacttaaaggaactctctgatattcaaaagaatatacttcaaaacgcttcactttacttaaagaaggaaggaatacttctttactcaacatgtaccctaaataaggatgaaaatgaaaagagtataattcaatttttgaagaacaatcctaattttaaagtagaacctatagaatttggagaatttccaaacttgatttattctccttatggagtgactatactcccaaatgaatatatggatggattttttatgtgtaagcttaaaaaaactaggtaggtgagaccttaattggaaaatattttagattacaatgaagctgaactcaagcagtggatggacaaaaatggggaaaagacttttagagctaagcagttttttgattggatatataatggtactttcgattttaaagatatgaaaaatctgcctcaaagcacaagagaaagactagaaaaaaatttttatattggcatgccgagtgttgttaagaggcttaactcaaaaaaaggtgatactgtaaagtttctgtttagatataatgatggaaatataatagagtgtgttgtcatgaaatacgattacggtaactctatatgtatttctactcaggtaggctgtagaatgggttgcagcttttgtgcttcaactataggaggaagagttagggatttaacttctggagaaattttagctcaaatattaaaggctcagaaagaaattggtgagagaatatcaaatatagttctaatgggaagtggtgaacctctagacaattatgacaatgttattaaatttataaggattgtaaattctgaaaaagggcttaatataggtcaaaggcacataactctatctacatgtggcatagttcctagaatatacgatttaatgaaggaaaatcttcaaataacattggcaatttctcttcacgcttctgacgatgagactagaaaaaagataatgcctatagcaaatagatactctatttcggaaattattgactgctgtaaaaaatactctgattttacaggaagaagaatcacttttgaatattcacttgtcaaggatgtaaatgatgataaagagagtgcaaaaaagttaggggaacttctttctggtatgctttgtcatgttaatttaattccagttaatactgttaatgagacttcttatgaaaaacccgaaagttctaaaattaaaaagttttgtgacacacttttaaaatataaaatagaaagtactataagaaaagaaatgggagcagatataaatgccgcttgtggacagcttagaagaaattatattgaagaaagtgaagggaaataatatgaaaatggtaggaatgctatctgatattggcacagttagaaaacttaatgaagactatgttggttactacgaaaatgatgacataagattttatgttgttgctgatggaatgggtggacataatgcaggtgaggttgcaagtaaacttgctgtggattcaactgtaaaatacataaaggaaataaataacattaatttatatgaacttggagatgtactttcaagtgcaataaaatttgctaatgaacagatttataggaaatcaaaagcgtcagatggactaagtggtatgggaacgactattactgcttgtttaattaaagataaagacgcagttgtagcgaacgttggggatagtagttgttattttataaaaagagatgatattataaaaataacaaaagatcactctcttgtacagcagcttgtggacaatggaacaataacggaaaaggaagcactttcgcatcctaataagaatattattacaagagctcttggaacaggggaagatgtggatgtagatatatttgatgttacactaaatgatgtctctaaaggaatacttgcgaccgatgggcttactaatgtagttgatactcgagaaatatataatatagtgctagaaaatgataatatggtggcatgtcaaaagttaattgaactcagcaaagacaaaggcagccgtgacaatatatcagttattgtgtttgaaggagagtgtaaagatgataggaactgtgctaagtaacaggtataaaatagaggaagaaataggtgtagggggaactgcagttgtatacaaagctatggatactcttttaaatcgtcatgtggctgtaaaagttcttaaacatgaatttacagaagatgaagagtttgtgtttaaatttaaaagagaagcatctgctgctgctagaattgccaatgcaaatattgtaaatatatatgatgttggagctgatggtaacgttaattatattgttatggaatatgtagcgggaaaaacacttaaaaagctcataaaggaaaatggaaaaatagagtttaataaaataattgactatgcaactcaaatagcaaaagcgttaaactttgctcataaaaatggaattgttcatagagatataaagcctcataatataatggttacggatgatgatataattaaggttacagactttggaatagcaaaagcatcaaatgaatccacaataactactacgaataaagttgttggttctgcacattacttatcgccagaacaagcacagggaattccagtagattgtagaacagacatatattcttttggaatagttctctatgagatggcaacaggcaaagtaccatatgatgcagatacccctgtttctatagctttaaaacatatacaggatgccgctgtacctcctaatgaattaaataaagatataccaattgccctcaataaaatgattttaaggtgcattgaaaagaaacctgaaaatagatatcaaaatgccaatgaaatattggatgaactgagtaatgtaaaaaataattatgtaaatgatgatgaagagtttacacgtgtaatggatccagctcagatacaaaatgagagcaatccaaataacaagttggataacgatgatacttactataatggagaaccatataataaagagcagcctcaagaggagcctcaagaagaaaatgaagagcctaaaaataaaataaaaggcaataatatgttaagtggtaaggctaaaaaggcattagttgcatccattattgtagttttaattttagcaggttctgcacttgctttttcaatgggatcaggaatatttaaaccaaattctaattctgtatcaaaggtaaaggttcctaaaataataggtttaagtgaaagtgatgcaaagggaaaagttgaagatgcaaaattaaagtttcaagttgttgatagagtaaagagcagtaaaccaaagggcacagttgtaacatgttatcctaatgaggatacagaagtagacagtggtacagttgtaagagttgatataagctcaggtgacactgatcaaacccttccttctcttgtaggacttcctgaaagtgcagcaagagctcaaattaagcagtacggatgcaatgttggaagtgttactcaagaatacagcgatgatgttgctcaaggtaatgtaattagtcaatcacctagtgaaggctctcaaataaaaaaaggaatgactatagaccttgtaataagtagaggtcctgaagttaaaaaggctacagttcctagcgtttatggtaaaacatctgatagtgcatcatctatattacaaaatgcaggttttggtgtaaatgttcagaataaggatgttacaaatgcggatcaaaacggtatagttatagaagagtacccaaatggttatgttaataagggaacaacagtaactatagttataggaagatttaacagtacagcagttcagccgccaaataacaataatggaaatggtaatcaaaaccaaaaccaaaacaaaacacctgatacaaatcatgatgacagtaaggcaccgactggcgggaataatgataatcagaaccagaataatacaactaatccaaatggaactcaacctgcaggtggaaatgtaactggaactggaaatggaaatgttacaaatacacctaatggaactggtcaaaaataaaataatcaatatttggaggaactatgcagggaattataataaaaggaatagcaggtttctattatgtaaaagttgaagaagaaatatatgaatgtaaagcaaggggaaagttcagattaggtgaactttccccaattgtaggagataaagttgatataacagtaataaatggtaagggtgttatagaaaaaatacatccaagaaccaataagcttataagacctcctgtttcgaatgtaacacaagcgtttatagttttttcaattgtaaatcctgaatttagcagtgatttattaaataagttcttaatattatgtgaatttaacaatataaaggttaaggtctgcataaacaaaatagatttagtaaatgaggagcttttaactccaataaaaaatttgcttaataatacaggatatgaacttaagtttttgaatgcaaaaagcaaaataggaataaatgagcttaaagaaagtttaaaagataacataactgttgtatgtggaccttctggtgttggaaagtctactctgatgaattctatagcaggaagtaatgttatgaaaactggagatataagcgaaaaattaaaaagaggaaaaaatacaacaagacacagtgaattaatagaagtagctggaggttttatagttgataccccaggattttcttcacttgatttgaattttatagatagatatgaactaaaagatcttttccctgagttttatgaatacaatggctcgtgcaaatattctacatgtgttcatgataaagaaccaggatgtgaagtaaaaaaagcagtagaagagggaaatatcaacatagaaagatacaatttttatgttgatacgctgaataaattaagtgttaggaggaattataaatgataaaattggcagcatcaattttatccgcagatttttcaaagcttggagaagaagtaagaacattagatgaagcaggagcagatttcatacatatagacattatggatggaaattttgttcctaacataagctttggaattccggtagtaagagatataagaaaacatacaaaactcacttttgatgtgcatttaatgatagaagaaccatcaaaatatgtagaacagtttgttaaaagcggggcagatataataactgtgcactacgagactgataggcatattgatagaactttaaattacataaaatcttttggagtgaaggcagcggtagcaattaatccaggtactcctgttaatatgataaagaatctactgactacagcggacatggttcttataatgtctgtaaatcctggatttggaggacaaaaatatattgattattcctatgataaaataagagaagttaaaaaatatgctgatgaaataggaagagatattttaattgaagttgacggtggagttgattcaacaaacataaaaaaagtagtagaagctggtgccaacgtagtagtagcaggatcagcagtttttaaaaatggcgatatcaaaaaaaatatagagttattaaagggaagtatttagaatgaaagtagttgttatttctggaggtaaaatgccatctgaagctttacttcgcagtgaaattgaaaattgtgactatataatttgtgcagacagtggagcaaactgcctgcacaaatatgaaattaggccagatatgctgttaggagattttgattccatagatgaagaagtttttaactattttaaggaatttcatataaatacaataaagtttcctagagaaaaagattttacagatacagagctagcttttagagaagctttaaagcttagtgcagatgagatttgttttttaggatgtacaggaactagattagaccacatatttgggaatctaggacttttatatagatgccttaaaagtggcataagagcgtatataaaggatgataacaatactttatttatgattgataaaactatatcaatcacaggtaaaaaaggtgaaatcttttctatacaagggtttagagaagagataaaggaattatctatagaaaatgctaaatatcctcttaaggattacaatttgagttttggagattctagaacggtttcaaatgaatttttagatgagcctgttacaataagcttcaaaaatggcactataattgtaatgaaatgtaaggattaggaaataattaaaaatagcctgcatataataatagagaattattaatgggggttatacttatgtcaaaaaagaagtggaatcgtgagataaataagtatggaatgggattaataatagcctctgttggagctggtatagtgatagcagtgattttaccaatatggggatggattattgcagtaggtggaggactcatatttttaggttggtttcttattaataattgtaataaaaagaaataattttatatgggggattattaatgaagattgtagctataaaacttccaaaatttttatctaatataattaagttttttttcagaaaaaaatcttaacatatataattataaaaaaataaaaaatgcaattggttaccaactgcattttttatttttatacagcacgttgtacttttccagaacgtaaacatctagtacatacatgtatagtttttggagtaccatctacaacggctttgatttttcttatattaggaagccatgttcttttagattgacggtgtgaatgactgtattgaacaccagcaacaagaccttttccgcatatatcacattttcttgacatagtctacacctcccttaaacgtgcgaaattaacttttcgcaaacaagttatattttatcatatattgtataaaatatgcaagtaaaaattactgatagaataaatttacaagaagtatttaaaatcattgaataattatctgttttaatataaaatggtagtgtgttatgcatttatgtgaggaggaatatagtatgatgcaaatttccaatgaaaatggttctataaatttttctgtggaaacacttgctaatatagttggcatatctacgatggagtgttatggagtagttggaatggcttcaaaaaatgcttctgatggattttgggaacttataaaaaaaggcggaaatttaggtagaggtgttaaaataaactctaaagatgataaattaaatatagaactttatattatagttgaatatggaacaaaaatatctgtaatagcaaataacataattcaaaaggttagatataatgttgaaaactatacaggacttaaagtatcaagcttagtggtgaacgttcaaggcgtaagagtttaaggaggtacaagaattggaacacttaactatagatgggcataatttttataatatgattgtaaatgcatgcaataaattagatgaacaaaaggactttgttaattctttgaatgtatttccggtaccagatggtgacactggaacaaatatgtccatgacatttagaaatgctgtacttgagatagaaaatatgaaaaatgaaggcataggaagtatagcaaagaaattatccaaaggtgcactcatgggagcaaggggtaattcaggggttatactttctcaaatactaagaggaatagcaagcggtttagacggccttaataaagtagatagtgaacagtttgctaagagtataatggaaggctcaaaatttgcgtataaggctgtaatgagacctactgaaggaacaatactcacaattataagaagcgccggtgaaagtgcagtaaatagtaaagaaacagatataacaaggcttatgtctgaagtatgtgctgctagtgaaaaaatgttaaagaaaactccggatatgcttccagttttgaaaaaagcaaaggttgtagattcaggtggaacagggcttttaataattcttaagggaatgcaggaagcattagaaaataacattgaagcagttcttgagggagttaaaaaatctagtgatgtaactaagcctaaggctgaagatattagtgatgctgaaataaagttcggttactgcactgaatttataatacattcaggaacttcaagtgtatcagaatttagagatgatatatcaaagcttggggattctatgatagttgtaaatgtagatgacataactaaagttcacatacacacaaacgatccaggtcttgtattatctaaggcagttaaattaggagagctttctaaaataaaaatagataatatgagggaagaacatagagaagttttaggacttaaaactgaaggctcaagtagtgaaacaacagaagaagctaatgaagatcaggaaaaagattttggatttatatctgtagcttctggagaaggtattgcaaagatatttaaggatttaggagttgattttgtaattgagggcggacagacaatgaatccaagtactcaagatatactttcaagtataaattctataaatgcaaaaaatatttttgtattccctaataataaaaatattatcatggcagccaatcaggctagtgaattaagtgataaaaatgttgtagtaatacctacaaaaacaattccacaaggaataacttgtatgactgagtttgagtatgatggagatgtggaaaaaaacaaagaaaaattaactaaagctatagaaaaagtaaaaacaggatctattacttatgcggtaagagatactgatgtagatggtaaagtcgtaaatgcaaatgatatacttggtatagttgaaggaaagataaaggaaacaggaaaagatatatatcaggtttgcgagaagataatagatggtatggtagatgaagacagtgagcttatatctatatactatggaaaagattgcagtgaaataaaagcgagagaattatctaaaataattgaagataaatatccggattttgatgtacaattaactgaaggaaagcaaccattatactatttcatagtttctgtagagtagcttacagtttgtaatgatttgaaaatcctgtaagtatattatttaaagtggcaagttaaagtggcaggtgaattaaaaatgttctatcttgaagtttttagaaagtcaccgtacatttaaaacttgtcacttttattattaattatgggaggatacataatgaatattaatgacgatattgcaacacttaaaggagtaggtcctaaaacggctttgaaattaaataaatgtggtatattcactatactagatttgcttctatattttccaagagattatgagaatttatctcttatgtctaatattctggaagttgaagatggacaaaaggttatagtgaaatgtacacctttaaggttagaaaaagaatttagatcgaaaagccgcaaaactgtaactaaaataatattttcagacggtaaaactacatttagcggtatatggtttaatcagccgtatataaagaataaatttaaatataatgaaacatatacaatcatgggaaaaataaaaaggactaaaaatgaaataactatgaataatcctataccagtggaaaatagaagttcaagtgatgaaaagatagtgcctaagtatgcactttctggaactttgaaaaatactttttttataagattgatatttgagcttcttcaaaacattaaaattgatgaaaatatgcctgagtggattataaagaaaaatgcatttcacagcttagatgagtcacttagagaaattcacagtcctagaaatatgcttgaactaagggaaagtacaagaaggcttaagtttcaagaattatttacatattcacttaaagttttaatgcttaaagagtatattaagaagaataataaaggttttgcatttaaaatagctcctgaacttattaaattgaaagaaagtcttccttttaaattaacagaggcacaaaatttggttataagagaaattctaaaggatgaaaagagacctcaggctatgaacaggttagttcagggagatgttggctctggaaagacaattgtggccttaattgctatatttaatgttataaagaacggatttcaagcagttttgatggcacctacagagatacttgcaaagcagcattttgaatctgcaaatactctttttaaagaatttaatattagaatagagcttttaacaggaagtgttactgataaaaataaaagaataataaaagagaagcttaaagacggagaaatagaccttataatagggactcatgctttaatagaagataatgttgagtttagtaatttgggaatagttgtaacagatgaacttcataggtttggtgtcatgcagagaaacaggttatttaataagggaaataatatagatgtacttgttatgactgcaacgccgataccaagaaccctagcattgtatctttatggcgacttagatgtatctataatagacacacttccaccaggaagaaaagaagtaaagacactttgtattaagaaaaatagcagacaaaaagcttataattttgccttaaatgaaataaaaaatggcagacagatatatgtggtatgcccactcgttgaagaaaatgagaagctagagcttacatctgtagaaaaattgtatgaggagctaaaaagcagttattttaaaggcataaaaatagaaatgcttcatggaaaaatggctccaaaagagaaaaatgctataatggaaagattcaataataaggaaacaatagttttagtgtcaactacagttatagaagtaggagttaatgttccaaatgccagtgtaatgataatagaagatgcacagcgttttggacttgcacaacttcaccagcttagaggaagagtgggaagaggacaatatcagtcttattgtatgctagttgcagaaatgaagaataaggttgcagaaagaagaatggaaataatgtgctcaagtagtgatggtttctacatatcagaggaggactttaaactaagaggaagtggcgaagttttcggtataagacaaagtggagaagatggacttattttatctgatataatacaggatataagtatattacgagaagccaacagtgcagctaaaaaactgattataagtacagaaaaaagtgacattgtgataaaaaagtcaatagttaaaagtttaaaaaatacatcaaagtacatatgttttaattaaaattaaaatattttgtataatatgtctttgtatgataaaatataaactaatgtattttttatattaggaggataaatatgagaataatatctggcaaagctaaggggagaaagattttaccacctaaaggaatggaaacaactagaccgactttagatagggtaaaagaggcgatgtttaatataatacaaaacgatgttcctgaagctgttgtcctcgatatgttttcaggtacaggaagtttgggacttgaggctgcaagcagaggggcaaaagtatgttatttaattgacaaaagccctattacatatccaatacttaaagaaaatgttgaaaatttaagatttgatgaagaatgcaaaaccttaaatatggattcttatgaagctgtaaggtatttagcatccaaagggaaggaatttacattaatatttatagaccctccttatgctaaggaaatgataccgccggctatagatttaatatgtgagaaaaaattgctgacaaaaagtggacttatagttacaaaaatagattccgatgaaaagatatatgagggaaataatgaaattatcatggtagaccatagaaaatatggtaaaactattgtatgtttttacagatacaaggaggacaaaaaatgaaggtagcagtatacccaggaagctttgacccaattacaaatggacatttagatataataagtagagcttctaaagtatttgataaagtaatagttggggttcttataaatccagaaaaaaaaggcatgttttctgttgatgagagagtagatcttatcaaaagagtcataaaaccatttaataatgttagtgttcaaagttttagtggtcttcttgttaattttatggaaaataatgattccaacgttatgataagaggtttgaggagtgtgggagattttgaatacgagcttcaaacttcactaatgaataagaaactcaatcctaatgttgaaactgtatttatgatgactagtttagagttttcatttttaagttccactgctattaaacaggttgctgtgtttggaggatgtatcaaagaattggtgccagatgaaattatagatgatgttttaagaaaagcaaaagaatttaattaattatagaaaagcagaactaattaaatttgtttgtatgaatgtttttctatatttatagggagagattggtcatgaacgtggttaagttattagaatatttgggggatattgttgatacttctagcaaagttccgctttcaaataaagttatggtaaataaaaaggagattttagatgttattactcaaataatgagtgaaatgcctgaggaactaaaaaaatctcaatggatacttagtgagaaggataaaattttaaatgatgcagttaaagaggctaatgaaataaaaaagcaggaaattgaaactataaaaatgcagatagataagcacagtataacattagaagcagaaaaaagagctagaaaactacttgaggatgctgaaaatgaggccaagcaaattaagttatctgcccttcattatgttgatgagctcttgtgtcatctagatagtcaattagatgatagacaagagcagtttaatgagaaggttcaaagagaagcacaaagtctttcaattaatgtacaaaatgattttaatagtataagagaaataataaaaaacaatatatcagagattagagaagttaaatagtcttttttattttgtatataagtataggtaatacagctaaaattactgccacagtaaaaaagtgagaaggacttaaaaagttattatttgcattaaaagtgcttattgtgttatttacatataaaaacttgaaaagtaaaaaacatattatactgcttattacaccttgaattacttttaatgatataaattttaagtatgatattttatattttcctataaaagagtatatttgagctatgacgcatagacctccaaaagatgaaagaaaacttattgttatcacttttagttcaattggaaagctgctagaagatagcatggaggagccgttagtcatttctacaattccaagtataaatgttttgataaaacttgcttcactgtttttaaaaataacgctttgttttaaaatacctattataactgaaaaaattattataaagctcattacttgcagtattacctttactgcattttctgtacttgttttaagagcagtaccaatggaatgtttttcgctaacattccatttagttttttttgtagaaaaatcatcttttttattaggaagaattattcccattgctatacatgatagataacatgaaataagaagaatataacctaaatacttattttttagcatagatgttccaactgcacctataataaataaaggtcctgggttggaagctatatttacaagcctttcaaaggtagaaaagctaattatatcattttcgtataaatcagcagcatactttgcccctaaaggatatccacataaaaaacttaccattagcacaattgacgctttttttggcagcctttggggaagacaaaggattggccctagaagtttagaatatatctcaattccatcgtagcatattattaaatttgtaataattaagaatggaaacacataggggaaaacgctgaagaaaaacagcttggccccagatattgaggctgatatacaaacctcaggtttcaagataataaacaatataattaatgaaagaaaaattgtcattatgtaatttgatgcagtacttaaatgaagctcctttataagcaaaaataaaagagctgttattaagaatataataataagtagaaaaaaaattatcaagtgaaaaaactcccccaattaatgtttatataaataatatatttttctttcaaatatatattacttaaactatgataatttttctataataatcatctagagggtttacacttttatttatcaagctgtaggccttggttgcatttatatctaaagatagtgcatcaaagttataattattaaccttagttattaaaggaatggagcttgtttttttaaattcttttaaagcatatttgcctttttcattaaaacctagaattctagcataagggcagggggaatttcttaaactttctgtattataacagtcaaacccaataaaatactgggttaatatcctagaaatacgtgaataggtatatcgtttattttttgtcaatgtcattaatgaatccatatttgagcacttaagtagagaattatatattttattatctataccttctgacacatcaggcagtttatttaaagattctttacttgtaagagccttatattttatatagtcaaaaatgtaatccttatagcataggctattaatattatccgatatcaaatcaaaagttttttttggaacttgatatctaagagtagaaatctctttttttgatttcagtgcatttcttatagcagaagcacttgagattgtttttagttctaaatcattatagttattaccctctctttttatagtatatggttttatattactttttagcttaattagactcttgcagtattccacaccaagtatgttatttgaggaggataaaatatcgtgatttaatccatgatctacttttgacaatgatgaatttaagtacatctctagtgcatgcattcttgattttggaaaagaaaacccttgatttaaatagtcctttaaaattgacttatattcatagggttcatctacaagtatctttgaaatcaaatatatgtcatgcatttctccttcttcgcttccaaagcatatatttgaaacgctgccaagagagttaagaaggcttacagctccgtatgcaaagaactccgcagaggataaagaatatacgcagggaagttctataactaaatcaactcctgaagaaagagctgcataagctcttgaccacttatctattattgctggttcacctctttgaacaaagtccccactcataacacatagtattacatcgcttttacaaatttcttttgttttttctaaatgatgaatatgtccattatgcattgggttgtattcagcaattattccagtaatgttcaaattaatcacctcaaaacgattatacagtattttcaatttcaatttcaattaaatgcaaacttaaatgcaatttttaaaaaaaaagagtatatggagttttaaagtataaaatcccaaaattatcattgttttaaaatcaatacaagaaaaaaagatgttgcaaaaatattaaaggttatgttataaagtatgtatagtaaaatgtattcgatttgaatttttaggttaatataattattggcattatgaagggagaaaatacaaatggatttaatagaaagcatatgggagtgtgctaagcaagacaaaaaaaggataatattagctgaaggtgaagaaaaaagaaatctaattgccgcagataaaattatcaaagagggattagcagagcttgttcttgtaggtgatgaaaataaaattaaagaaaaagcaagtgagttgaatcttgacatttcgaaggctgaaataatggatccagagacatcactaaaaacagaaacatatgctagagatttttatgaacttagaaaacacaaaggaatgactattgaaaaatctgaaaaaatggtaagagatcctctttattttgcaacaatggctttaaaagatggctatgttgatggaatggtttcaggagctgttcacacaactggagatttattaagaccaggacttcaaattataaaaactgcaccaggagttaaaatagtatcaggattctttgttatgataatacctgactgcgattatggtgaagagggtcttttattatttgcagattgtgctgtaaatcctaacccaacatcagatgaactagctgatattgctataactacagctgaaacagctagaaaattatgtaacgtagagcctaaagttgcgatgctttcattctcaactatgggaagtgcaaaaggcgaaatggtagataaggttaaaaatgctgttgaaatcacaaagaaattcagaccggatcttgctattgatggtgagcttcagcttgatgctgcaatagatagtgaagtagcggctttaaaagcaccttctagtaatgttgcaggaaatgcaaatgttcttgtattcccagatcttcaaacaggaaacattgggtacaagcttgttcaaagatttgcaaaagcaaaagcaataggacctatatgtcaaggatttgcaaaacctattaatgatttatcaagaggctgtagctcagaggatatagtaaatgttgttgctataactgttgttcaggctcaaagaggtatataaggaggatttttatgaaaaacttagttattaactgcggtagttcatcaatcaaataccagtttatagatatgaaggatgaaactgtactcgctaaaggattagttgaaagaattggaataaaaggatctgtaataacccataaagtaaatggagaaaaatatgttacagaaactcctatggaagatcataaaaaggctataaagcttgtattagatgctttattaaatgatgaatatggtgttataaaaaatattgatgagatatcagcagtaggacacagaatcgttcatggtggagaaaaatatgcaaactcagttttaatagatgaagatgttatgaagtctatagaagattgtgtgagtcttgcaccgcttcataatccaccacacataataggaattaatgcttgcaaggaattaatgccaaacgttcctatggttgcagtatttgatacagcattccatcaaactatacctgattatgcatatatgtatgctattccatatgaatattatgataaatacaaaataagaaaatatggttttcatggaacatcacacaaatatgtatcaagaacagctgcagaatttataggtaaaaaagtagaagatttaaaaatggtagtatgccatatgggaaatggtgctagtattacagctgtagaaaatggtaaatcagtagatacaagtatgggatttactcctcttggcggtcttgctatgggaactagaagtggagatatggacccagcagtagtaacttttttaatggataaattaaatataaatgcttctgaagtaaataatctattaaataaaaagtcaggtattgaaggcttaagtggaataagcagcgatatgcgtgatattaaaaaaggaaactatgtagataaagaccctaaagctatgctagcttacagtgtatttaactataaaataaagcaatttataggttcatatactgcagttatgaatggattagactgtttagtattcactggtggaataggtgaaaattcatttgaaaatagaagagaaatatgcaaaaacatggattatctaggaataaaaattgacgataagaaaaatgatgaaactatgggaataccaatggatataagtgcagaaggttctaaagttagggtacttgtaattccaactaatgaggagttaatgattgcaagggataccaaagatatagtaggcaagttaaaataaaacttgacatttattttgcatgcttatataataaattatggctgcgttaatgatttaacattaaaacagtttatttttgtgaatttgaataaatataacttattgacttaggagcttataataacatgttagatgtttctgatttaataaccaaaaaagtcgacaaaaaagatgtcgacattcagcttggtatgacgtattttgattatgactctgaagaatccaagatttttagagccattaaccttaaaaggtaaattgttgatggataatagtattatacctttgtatgctgaagttaagggcattgttgaacttacttgttcacgctgtcttcaaaaatttccttacgatattgatttggaaatagacgaaaagttcaccgacaatcccgaaaataaggatgatgaagtcatctttataaataattatgaagtagatataaatgaaatcgttgaaaacaatattatactttctctgcctataaaaaagttgtgcagggaagattgcaagggcttgtgtcctatgtgtggcacaaatttaaatatatctacatgcaattgtcatgaagataatattgacccaagatttgcaaagcttaaggatttgttttcaaatcattaaggaggtgtatacaagtgggaaatccagctagaaaattttcaaaagctagaagagattcaagaagagctcaaacttttaaattaagtttacctggaatggttgaatgtccaaattgtcatgaaatgaagcttgcacatagagtttgcaagaaatgcggttactataaaggtaaggaaatagttgctgtagaaaagtagttaaaagaaagtctcgtggctttcttttatttttttaatttacagacatgttaatttaacccaaagtgaggtgtgaattatgataatagctattgatggaatgggtggagataatgctcccgaggctgttgttaaaggatgtgtagaggctattaaaggcaatagtagcatacacattataataacaggtcccagtgacaaaatcagtgccgaactaaaaaaatacacttttaacgaagaaagtatagaaatagttgatgctaaggatgttataactaacaatgaacatcctgttatggcagtaagaagaaaaaaggaatcatctctttataaggctttaaatcttgtaaaagaaggaaaagcagatgctgttatttcagcaggtagtacaggggcattaatggcaggtgctacacttatgataggaagaataaaagggatagatagagtagctctatcacctattatgccaggaaaaaattctccttttatggtaacagatgctggagcaaatgttgattgtaagcctcaatatcttgttcaatttgcacttatgggtaaaatatattttgaaagtgtactaggcgttaaaaaaccgactataggacttgttaatataggtgcagaggaagagaagggtaatgaattaactaaaagtgcatataagcttctaaaagagtcaggacttaattttgttggcaatgtagaaccaagagatgcatctactggtgatgttgatatattagtatgtgatggattcgttggaaatactcttttaaaaatgtatgaaggtgtagctttaaatttatttaaaatgcttaaaagtgaaattacatcatctacaagagcaaaagttggagcattgatgttaaaacccgttctaaaagattttgcgaaaaaatttgattacagtgaatatggaggttcgcctttcctaggttcaaaaggtatagttataaaagctcatggaagttcaaattcaaaggcttttaaaaatgcaataaatcaagctgtatcttgtagtgaaaataaaataatagataagatttccaggcaattagaagagctaaattaaatattacgaataatttaactgtataaagtaatagaatttagtatataaatattgacgacagcaattatatgtaatattatcataatagagtttaggaggtgaaaacatggtatttgaaaaagttaaggacataatagcagatcaacttggtattgatgcaactgaaataaaaatggaatcctcttttattgatgatttaggagctgattctcttgatatagttgaactgataatggctttagaagaagaatttgatatagaaatgcctgatgaagaggctgaaaaagtttcaagtgtaggcgatgtagttaattacataaaagctcatacagaagagtaaaagaagtcccgttttatgcgggactttatacttaaaataaagtttattcttgaaattattaattatacataatgtgtatgtagatatctgtaatttgaagaatgcacttataaggagtgaatttcaatggaagaagaaagattattagaggaacttgaaagtaaattaggtatagaatttcaaaatataaatctccttgttaccgcacttactcatagttcatacgcaaatgaaaataagaatgctgaatataatgaaaggcttgaatttttaggggacgcagttcttcagctttctatatcagaatacttctttaagaagtacccaactatatcagagggggaacttaccaaaaagcgtgcacttgttgtttgtggtatgtcccttcactcaataggggaaagatggcagcttggaaaatatataagaatgagtcatggtgaggagcttacaggagggcgtacacgagtttctattatagctgactgcgttgaagcagtaattgctgctatatatctagataaggggtttgacactgctaaaaattttatcttgagggagtttgaaggtacaatacaaaatgcagtagaaaacaaaataatacttgactacaaaacgagacttcaggaaattcttcagtcaaaaggaaaaactgatataaaatacactcttgtaaggcacgaaggtccacctcacagaagaaagttctttgttaatttgaattttgataatgatgttaaaagtactggtgagggatacacaaaaaaagatgcagaacaagatgctgcatgtaaagcattgaaaggattggataattaaatgggcaaatctcactatataatacctatttttgttccacatgaaggatgtccgcatgactgtgtattttgcaatcagaacaccattactggtgaggaaagcaaagttaatggtgactatgtaaaaagtactgtagaggattacctagatactattcctaataagagtgcaactatagaaatatccttttttggtggaacctttactgcgataaacatagaaaagcaaaaggagcttctttctgttgcaaggcattataaggaaataggtaaaattaaatatataagattgtcaaccagacctgattatatagatgatgaaatacttaccaatctaaaaaattattccgttgatataatagaacttggtgtacagtcacttgatagtgaagtccttttaaaatcaggaagaggtcatactaaagaagatgtagtaaaagcatctaggcttataaagaaatatggttttactctaggccatcagataatgcttggtttacccggtgataatgctgaaaaggacatagaaaccacaaggaaagtaatttgtatgaagccaaatatatgtagaatttatccagcgcttgtaataaaggatacggcaatggagaaaatgtataataggggtatatataagccctacgatattgaagagtgcgttgaaattagcaagattgtttttggtatgctttttgcaaatgatattgaagttataagaattggacttcaacctacagaagagataaatactgacggtgagttagtagcaggtccatttcatcctgcatttagagagcttgttgaaggaagtattatgaatgaaatgatttttgataacttaaaggaatgtgaatcaaatactgtggatatatacttaaatccaaaagatatatcgaagttgtattcaaataagaagacctttttttacagtatgaaagataagttgaataatttaagaattaatgttattcagaatccagaggtggaaaaagatactttaaagatgaattttgacgataattgtaaaatagtatcaaaatatgaatacttaaaagtaaaatacaaagaaggaaaataaagtattttatagaatatataacctcgtaaactaattttattgggggtatatattttatggaagtattaaaagtatcagctaaatctcaacctaaatccgtagcaggtgcattagcagcagttcttagaaatagtaattctgctgaagtacaggcggtaggagctggagctataaatcaagcagtaaaagccatagcaataactagaggatttgtagctcctaatggaattgatcttgttgttgttccagcctttgctgaaatatctattgaaggcgaagatagaacagcaataaaatttatagttgaatcaagatagagaaaaaccgtgttatcacggttttttattgaatttttttataaattaatataaacttatagtgtttacatttttaaattttatgaaaggaagatacgttatgagaaaagcaacaagagaaaaagcaacaaaggttcttgcttgcataattgtgcttgccatgattattggattgtttgaaggatttatctttagaagttaaaaaggagtgcttttatgtttcttaaatccattgaaatacgaggctttaaatcttttgccgataagacagatttgattttcaaaaatggtataactgctgttgttggtcctaatggaagtggaaaaagtaacatttcagatgctgtgctgtgggttcttggagaacaaagtgttaagaacttaagaggcggtaaaatggaggatgtaatatttgcaggaacccaatacagaaaatcagttggactagctcaagtatctttgattcttgacaattcagacaaacaacttaatcttgattattctgaagttactgtaagcagaagattatatcgatctggagacagtgaatattatataaataatactaaatgcagacttaaagatatacaagaattatttatggatactggtatcggtaaggaaggatactccataattggtcaaggtaaaattgaagctgttttaagcggaaaaccagaggagagaagagcccttttagaagaagcagcaggtatagtcaagttcaagactagaaaagtagatgctgagaaaaaacttgaaaacactaatcaaaatttagtgaggataaatgatattttaagaacttatgaagaaagattagaaccacttagaatagaaagtgaaaaagctaaaaggtttgtggaattatcagatgaacttaaaacaaaggaaataaacaccattatatattcaattgacaatatagattacagaattaatgatttgaaacaaaaaatggctgatttgaagctatctattgatgaaaatgttaaagataaagaaaaaatttctttagaattaaaggtggctactgaaagcttggatgagtttgatgctaaatattctagtaataaaacaaaatactatgagagtaaatctgagcatcaaaaaatactttcagagatagaattattaaaagaaaaaacaagtaactcagatgtggctaaaaataaactctataaagaaattgaagatttggataacagcatcgtaaatctaaaaagtagatacgagattcaattaaaaacattaacagaagacaaaaattacaataaagagttattaagtaagataaacaaaagtgaagaaaagaagaaaaatattgatggacttattgaagagtgggaaaagtcaataaaacagtataaaaatgatgctatagacataatcagtactatttctcaaaataataatgaggttgtaatattaaaaaaagaaattgaaagtaatgaatcaaagctggaaagcataaaaagggctggagaaggatattctaagtccttaaaaataaatgaggttacaaaaaacacactgagtgaagagctagtaaaaatcaatgataaaataagtggatatgaaaatcaaataagagaaaatagaagcaaaatatcaaaattgaatagaatcatatctgatgaggaaaaattaaacagagagttaaattctaagtctaataagttagaagctaataaaaatatgcttatcaatctcgagaagcagtatgagggatataataggtctgttaaaaatcttatgcagcatgttacaaagggctttgttgatgtaaaacctgagagttcatttgtacttggagaagttataaaagtaaaaaaggaatttgaaactgctgttgagatatcactcggggctgctatatctgacattataactctagatgataacattgcaaaaaaacttataaactatttaaaatctaaaaatctaggaagagccacttttttgcctcttaatattataaagggtaggaaattaaatatttctgatgctactaggcatgaaaaaggttttataggcatagcaagtgaacttatagattatgacagtacgtttttgcctgcagttaattatgtacttggaagaactgtaattgtagataatatggatagtgcacttaagattgcaaaattaaattcatattcatttaaaatagtaaccttaacaggagaggttgtaaatccaggaggttcacttacaggaggaagtacatattcaaaggcagcaagcataataggtagaaaaagagaaattgaagagttaaatctagagcttaataatgtatctcaagcattggagcagtcttcaaataaaataattgaaaataagaaagttgtaaaagaactagataacctttgccttgatttaacagacacaatccatggagaaaaaatagaacttacaaaaatcaaggaaagattaaagtccatagacattgaaagtgaaaaattaaataaaagctataatacctctgttggtgaaataggcttcattaaggaaaaaataaataagcatttagaaaaactcaaagtaaaagaggaagaaaataaagctttaaagttaagagaagccaataacaataatttaatagatgaattagagagaaagctaaaggatgaaaattctaaagttttaaatttaaatgaagaaataatgtctatgaaggtagataaagcaaaaagtgatgagatgcttatgtcttcaactagagaaattgaaagatacaaggttgaaatgcataacatggaaaataagaaaataagcctaaaaaatgagattgacgattttgaaaatcaagtcaagattctaaaaaataaaattgagtataataacggtaaggtagttcaaataaaacaggtaattgaagaacttgaaaattcctttaaggatagcgaagtagaaagatctaaattaaagggaaacatagaaaacaagagaaattctcttcaaggtataaacttagttttacaaaaattagagacagaaaagcataggtatgagataaatttagccaaaattgaaacagaaagtgaaaatctctatgaaagattaaacagcgattttaaattaacttattctgaggcagctgagtttaaagaagaaattgaagagatgataagttataagaaaaaaatagatgagttaaaaagagaaataaataaaatgggagtagtaaatgtggctagtattgaggaatacaaagaagttaaagaaaaatacacatttatgaattctcaaaaggaagatttagataacgctaaggatgaacttatacgtgttatagaagagatgacttcaaaaatgagaactgtgtttaatgaaaactttaagaagctaaatgagaattttaaaattacatttagagatctttttaaaggtggaaatgcagatcttatattaagtggagatgatgaattaaacagcagtatagaaataaatgttgagcctccaggtaaaaaacttcaaaatataaatttgatgtccggaggagaaaagggtctttcagctatagcgcttttatttgctatattaaaaatgaaacctactcctttttgtatacttgatgaaattgaggcagcacttgatgatgcaaatgtggcacgatatgcagaatttttgagaagattttctgagaacactcaatttattgtaatcactcacagaaaaggtaccatggaagcaagtgacgtactttatggtgttacaatggaggaaaaaggtgtttcaaaggttatatcattggacttagatagtgatagagaaaacgtaagttaaaataattgtatttacaggaaggtgaaaatatgttaggtaacttttttgataaacttaaaaatggtctttcaaaaacaaagaacaatcttacaagtaagataagtgatgtcttaacatctacagtaactatagatgatgatttatatgatgagctagaagaaattcttataacttcagatataggagtagaaacatctttgtacataatagataagcttaaagaaaaaataaaagaaaacaaggtaaaagacccatcacttgtaaatgactgtttaaaagaagttataaaagatatccttggtgataaaaagggaagcttgatgccaaaacaaattcccgaaacaatattagttgtaggagtaaatggtgtaggaaaaaccacttctattggtaaaatttcttcaagacttaagtctcaaaatttaaaggtaataatggcagctgccgatacatttagagcagcggctatagatcaacttgaggtttggagtaaaagagccaatgtagatataataaagcatcaggaggggtctgacccagcagctgtggtttttgatgctattgaggcagctaaagctagaaaagctgatgtattaatatgtgatactgctggaagacttcataataaaaagaatcttatgaatgagcttgaaaagataaatagaattattgatagagagtttagtcaaagtacaagaagaacattacttgtacttgatgctacaacagggcaaaatgcagttattcaagcaaaacaattcatggaggtttgtaaggtagatggtatagttctaacaaaattagatggtacggctaaaggcggtattgttatttttataaaacatcaacttgatatacctgttgaatttgttggggtaggagaaggaattgatgaccttcaggaattcaatccatcggattttgtagaagctttattttagtataaagagtgttaagtaaaagtacttgacactctttgcgttttttgatatgatattatcattggtcggtggtttgaatggaagaaagaatatatttgtcaatgcttttaagcacttatggcagtctacttacagaaaagcaagtgaatgtcatgagattatattatgacgatgatttatccatgccggagatagcagaattaaacaatactacaaggcaagctatacatgatttaataaaaagatgtcataaaatgcttttaaactatgaaaataaacttaaacttgtagaaaagtataaaagaaatgaagatataaagaaagacattaaggacaaactttatattttgaaagataaaattcaagataaagataatgttcagttaattgatgaaattgaaaaagatataaattcttttagtatataaaacggggagggattttacatggctttcgagggattatctacaaaattacaagcagcaatgaaaaaactcagaggaaaaggtaaactttctgaaaaagacataaaagatgctatgagagaagttaagcttgctcttttagaagcagatgttaactacaaaatagttaagaactttgttaaagtagtaggagaaaagtgtctaggtaatgaagttatggaaagtcttactcctgggcagcaagttataaaaatagttaatgaagagttaactaacctcatgggtaaagaggaaagcaaaatagaatttgaggaaaatggaattactgttataatggcagttggacttcaaggtgcaggaaaaaccactatgtgtggaaagctttctcttagtttaaagaaaaaaaataaaaagccacttcttgttgcatgtgatatatatagaccagcagctataaagcagttagaggtagttggaaagtcaatagatgtccctgttttttctatgggggataaggttaatcctgttgatatttcaaaggctgcaatgaagcatgctaaagaaaatggtttaaatgtagttataatagatactgcgggaagacttcatattgatgatcagcttatgaatgaacttgagaacataaaaagtgaagttaatcctaaggaaattttgcttgttgttgattctatgacaggtcaagatgcagtaaatgttgctgaaagctttgataataagcttgaacttactggtgttgtgcttactaaacttgatggtgatacaagaggtggtgctgcactttcaataagagaaatgactggaaaacctataaaatatgtgggtttgggtgagaagatgaatgatattgagatctttcatcctgatagaatggcatcaagaatacttggtatgggtgatgttttaacacttatagaaaaggctcagtctgctattgatgagaagcaagcaaaagagcttggtgacagaatgctcagccaggaatttaattttgatgattttcttcaagcttttgagcaaatgaaaaagttaggacctataggtaagcttcttgaaatggttccaggttttaatagtagtatgcttaagggtgttgatttgtcaaaaaacgaaggtgaaatgaaaaagtatgaggccattataaaatcgatgactgctaaggagagaaaaaatccatcacttataacttctacagcttcgaggaaaagaagaatagctcttggatcaggtactacggttcaagaagtaaacaaaatacttaaaaacttcgagcaaatgaagaagatgatgaagcagtttaaaggaaataagttttctaaaaaagggttatttggtgggaaaatgcctttttagtagataaataagttattctttgaaggaggtgaacacaatggtaaaaatcagattaaagagaatgggtgctaaaaaagctcctttttacagaatagttgtagctgattctagaagccctagagatggaaagttcatagaagagttaggatactacaatccaactacagagcctgttactttcaaagttgatgctgacaaagttaatgcttggatgaaaaatggagctcaaccatcagaaacagttaaaaagcttttagataaaagtggagtaacaactaaatagtaagtttgggggtgtctaacatgaagcaattgctagagactattgcaaagtcattagtagattgtcctgatgaagttcaagttagcgaggttactggagaacagtccataatacttgaattaaaggttgcacctgaagatatgggaaaagttataggaaagcagggaagaatagctaaggctataagaactgtgataaaggcagcagctgtaaaagaaaataaaagagttgttgtagaaataatataagagttagggttttctaactcttatatttttattttagtgtattaaaatgaaatttataggacataatattagtatgactataaatttcattattatataaattatgtacgtgctcggaggtgtttttatggaagatttttttagcattgggcaaattataaatactcatggagttcgtggagaacttaaaatttatcctctgacagatgatatcaatcgctttgatgatttagatagtgtttacgttgataatgaaataaaaaaggtaatctcagtaaaaaagcaacctaataagcttatattgaagttagaaggaatagatactttagatgaggctgtaaaatataagaataagtatattaaagttttaagagaagatgcagttgagttaaaagaaggtcaatattttattaaagatattataggatgtaatgtttttgatgaaaatgataaggatttgggagaagtatatgacgtcataagtacaaaaaataatgatgtatactgcataagaaaagaaggtcagcaggatattttggtgccagctcttaaagatattgttcttaaaattgaaatagagaataaaaaaatagttataaaggctgttgaagaatggctagaaagttgaagatagatatactaacactatttccagagatgtttgacttattcaatttaagtatgataggcagagctaaaaagaatggcataatagaaataaatacttataatataagagattacacaatagataagcataaaaaaactgatgactacccttacggtggcggtgcaggtatggttatgacacctcaacctatagttgattcaattagaagtgtaaaggaatcaaataaagggaaggtcatattcttaggtcctagaggtaagaaatttgatcaagaggatgcaaagaaactcgcagacagagaagaattaataatattatgcggccattatgaaggaatagatgaaagagtatataaatatatagacgaagaatactctcttggggactttgtactaacaggaggagaaatggcctgtatacctatagtggatagtatatgtagaatgattccaggagttttatcgaaaagtgaaagttatattgaagagtctttctatagtggacttttagagtatccgcagtacactaggccagaggagtttgaaggcgcaagggtaccagatgtacttatttcgggacatcatgagaatataagaaaatggagaagaaagcaggctctaaaaataactaaagatagaagaaaagatttatttgataagcttgttatgacgaaagaagacaaaaaactgttaaatgataacgaattataagattcttagtaaaataaattattgattaacgcctaaatttgtgataaaatttaaatgttattgtgcaggcggtcctctgtcttatatctaggcatgaacgtcaaataaaattaggaggtaagtgcacatgttagatgttataaaagaaatagaagcagaacaaataagaacagatcttccaagctttaatgttggagatacagttagaatcgaagttagaatcaaagaaggcgagaaggaaagacttcaagcttttgaaggaactgtaatcaaaagacagaacggcggtcttagagagactttcacagtaagaagagtagcatacggagttggagttgaaagaacattccctttaaatgcacctgttattgctggtcttaaagttgtaagaagaggtaaagttagaagagctaaactctactacttaagagatagagttggtaaagctgctaaggtaaaagaaataagataaaaaacaggggctctatagtccctgttttcttatcatggtggtgataatttgggtaaaagtttgattgaatttggaaaatctataattatagcaataattgttgctgtaattataattatgtttgttttcgaaaccgtcagtgttgacggcacatcaatgtacagcacacttcaaaataatgatagattaataatagaaaaaatttcttatcgtttcggatttcctaaaagaggggatataatagtatttaaatgtcctagtgatacaactaaaaagtttataaaaagggttatagcagtagaaggtgacaaggttaagattgtaaatgataaggtatatgttaatggggttaaattaaatgaaaattatgcatactacatgaatcaacaagtaacagatgatcctagggttcatgattatgcacttagaactgttcctaaggattcagtttttgttctgggggacaatagatataacagtttagatagcagatttgaagatgaagttggatttgtaaacaagaagcttattattggaagagaagctttgagaatttatccttttaataaaataggaaaggtaagatagaaatgatgatagaatcaataaactggtttccaggacatatggcaaagaccacaagagaaataagagagaacttaaagctggttgatgcggtaattgaaataagagatgcaagaatagtatattccagcagtaatcctgatataaatagtatttgcaaggataaaccaaggattattcttttgaataaatttgatttagctgagaaatccataaccgataattgggtaaaggcattatctagtgaaagtataagagctattccagttaatgcacttgagggacgtggattaaatagtataaaacctgcattaaatgaacttcttaagccaaaacttgataatatggcagctaaaggtattcaaaactatattataagagtaatggttgtaggtatacctaatgtaggtaagtcttcattcataaataaaatggctaaaaataaagttgcaaaagtaggaaataagccaggtgtcactaaaagtaagcagtggataaagacaaatataggaatagagcttatggatactccaggtgttttgtggcctaaatttcaagaccaaaaggttggacttaatcttgctttcactggagcaattaaggatgaaataatggatatagaagaacttgctttaaagttagttcaatttttacagaagaattatcctgaaaagttaatggaaagatataagttagaagatataaatgaagatccacttatcaatatgaataacatagcagcaaaacgtggtgcccttttaaaaggcggagaaatagactataatagagtatcaattattattgttgatgaattcagatcaggaaaaatagggaaaatatctcttgaaaggccgtgattaaatcttggattttttacaaatgagctttaaagaaataaaaagcactttggaagatatggatgagcaaagtaggctttcagcagctcacgatattatggatgacacaagaaagaacgttaaatctctaggtaaaaagattctaaatgcctatgaaaaaaaacaaaatgaaattgcaagggtaaaaaagctgtatgagtttgataagcaatttggaaacattgttattgcaggtgtagatgaagttggaaggggacctcttgcaggtccgatagtaggtgcagctgtaattttagagttgaatgtagaaaaagatttagaccttatacttggaataaatgattcaaagaaattaagctctaaaaaaaggcaagagctatcggaaattataaaagaaaaagctttggcttgggagattgcatcattggataataatgaaatagataaaaagggaatctcatggtgtaataatgaaatatttaaaattgccataagtaagctaaagaaagtgcctgaacttgtaatatctgatggatatgcagttaaaggaattggaataaaaaatcattacatagtaaaaggcgatgcacaaagtgcaagtatagcttgtgcatcaataatagctaaagtatatagggacaatttaatgggtgagtacgctaaaagctattcagagtatggctttgaaagcaatgttggatatggttccaaggatcatatagatgctataaaaaaatttggaacaacaccaatacatcgtatgagctttttgaaaaatattatataaataaaaaggcacagcttagaatctaagtctgtgtgcttttatttatattgctatatttgaaatgcattttctataaattttaaatcgtaagaatcattttgatgatttagtattacctctatgacgtcaaacctaaagttatagtttattagactcttacttgcgatataatatttagcagttctataaatttttaatttttttctgtaatttactgcctcacagggcaagccgtaggtatcactccatctagatttaacttctacaaaggtaatataatctttattctttgctattatatccacttcgcctaagaagcatctgaaattcctattaagtatagtgtatcctgatttttttaagtatatttctgctgctttttcaccataatcgcctgcttttttattcaatctatgcataaattacctcttttcttaaaatattaattttctactgtgaagtgttgacagtttgttacaaagttattataattgattaaataattataatttagcacagaagctaaacataataaagtataggaagtgaacaaatgaggcccgtaattggaattacagcattatgtaaaaatgaaaatggcaatctttttacatttttaaattattattattcaaaatccatagttatggcaggtggaactcctatattgattccacttggtggagaagatgatgatattaaaaattatatagatataatagatggtttgatattatcaggtggcgaagacataaatccacttttttatggagaaaaccctacaaataaaattaattacacatctccggaaagggatgaatatgaaaaaaagttatatttaaaggcactagaagaagacatgcctattttagggatatgtagaggcttgcagcttatgaactcggtatctggaggtaacctttatcaagatataaatatgcaggttgagaactctaatgggcatagtccagtgggaatctctaaatcaaacttataccatactgtgaatatagttaagaattcaaagctttttaatatattttgcgaggaagaaattaaagtgaattcctttcatcaccaagcaataaaaaagctaagtgataaatttataatatcggcacaaagctctgacggcatagtagaaggtattgagcacaaatacaatacttttgtactaggagttcaatggcatccggaatatttatcttctaaataccctgaatttttaaagctatttaggacttttgtaatagagtcagagaaatttaaaagtagataatggttttatacaattttttcatcaataaattttctgtattgaatagcttcaattatatcttttgaggctatttttgatttctcattaacatcagcaattgttcttgccacttttaatattcttgtgtaggctcttgtgctgacttcaaacttggaaagtagagctttcattatttttgtaccctcgtaatctagcttgcagtatttatctatatgttttttattcatttgtgaattgcaatatataccatcatttttaaatctaacttcctgtatttctcttgcagttgtaactcttttgcgtatggcttcagagctttctgaatgctctctttttttaatttcctcatagttaagataatttacagaagaaaatatatcaattctatccataattgctcccgacaattttgaaacatatcttttcctttgatattctgtacaggtgcactctttattagaaccatagtttccacacgggcatagattcatagcggatataaacatgaagttagcagggtaggttacattacctgacgatttagaaaatcttataaccttgtcttcaagaggttgacgcagtacctcaattgaactccttttgaattctaataactcatctaaaaataaaactccattgtgagaaagagaaatctcacccggaaaaagcttactcccacctccaacaagggatatttttgagctagtatgatgaggagctctgaaaggtcttttgaaaactaaatttttgttatcaaattgtccagttatactgtatattttgcttacttctaaagcttctttatagcttaaaggaggtaatatagtggggagtcttttggcaagcatagttttaccagatccaggaggaccatatagaattatgttatggcctccagaagcagcgatttcaagagctcttattgaagtagattgtcctgctatgtctgaaaaatcaactccatagttaaagctatttcttatagtatttttagttttatagggaagtacatctctgtatttaataaaattgataacttgaactaaattattgaaaggataaagttttatgttttttataatggagcattctgttaggttttcatatgggattataaaattatttaaatttgtatgtactccttcaagtaaagcaggaagagcaccacgtatgccttttagattaccatttaaggataattcgccaataagaaaaaagtcatctatattatcaaaataaatttgttttgtggagagaagaatacctatagctattggtaggtcaaaggaagagccttctttttttaaactcgcaggagctaaatttattgttattctgcatactggaaacttaaaaccggaatttatgattgcggctctaactctttctcttgattctctaacagcagcatctgctaaaccaactatattaaaagcgggaagaccttttgacacatcaatttcaacagataccatgaagccatttatcccagttaatgaggctgattttaatattactgtggacactttaattacctcctaaataccttataaaataaattattgacaaattaattaaaataatacagataagtgatattaccaattataaatgtaggcttttttaattggtgaataagtatagttaatatagtggttaacaaaatagtgtcttagagtagaagttgtttttaaatgctctattgtattaacttcaatttagtttacataactaaaattatgacgactaaataaaaagtaaacttaaagtaagattataagcaaaatttgcagcaagatgattattaaatatcagcaatagacggcggtaacataatattttaaatttaattttttaaaagaaatataactaaaatgagtcatttttaatatataaaggcaaaagataaaaataaagaagtagaaaacaactatagaagattataaagatagaaattacaaatatcaattttgattgtgatttacaaagaattaagatgatgcattatgacaaagaattgttatacaagaagtatatatagtgaaggggggattaaagtgaataaagttgatgaagaaatagtagaaggcatattgaagcgtgatttgaattcttttaataaattcatagaatgctacggaattatgattcataatgtagtaacatctatattaaataaaagtcatgaaagccaaagtatagaagaatgcgtagatgatatattaatgtgcatctggcggaatatggattgcttctcaaaggaaagaggaagtttaaagtgttggataattgttatttctaagaataaagcactagattacaagaagaaattaaaaaaaattatgaatagtgttgatatagataatgtgaaattaaattctttagtagatattgaacaggattacttgaaagaagaaaatagaaaatcaataatagaacttctaaataatttaagtataaaagacaaagagatttttataaaaaggtatatgaatgattggtcaattgagaagatatcaaaagatatgggcttaacgtctattgcggtttataataggttaagtcgtggtagaaaaaagctaaaaaaagttttaagtgtaggtaaggagggataggttatggatgacaaaaatctatttagaaattataatgatattgtagttagtgaagaagagatagagaagtatgaaacaaagaaggttgatgatgatgtactttctaaaatgaagaataaggtaaaaaagttatatatgaaagttaatatggaagaagcatttgaaaaagttgaaaaacaatttgaagatgatgaaaaggtagagtatatgttttgggcagaaacctatggagttaggaaatatcaaatggtatgtgggggatattattcccttgaaggtgctatatcgaatgattggggtacaaaaacaggaattgttttgactaacaagggtatatttggaattgaaacgaatgatgcttatggtgttttaaaaataaaaaattttagatttaaagatgtcgaatatattgaaagtaaaaaaataaaaaataattttacggtatttgcaataaaatcaactagcggaatagagataaaagtagaaatatacaatggagacagacatattaaatttttaaattatattaggaataataatattaaagtaaatattcgcatgatacaagatagaaagattcaaatagcttatgtatctataataattattattatgatttttataatatttgttatttcgagctcgattatgaggtcaggaatcacaaaataattatagttataagagggtaaatcattttgtgtaaactttagaaaaataaattttaatttattaaggttgggggtaaatatatgcctacaactttatttgaatttaaatgtatttttattacatcataatatatatttaattaagcataagtgaggccattattaaaaaaatgtagtaagctcatctaaattatttttccaagattttattactattaagcattgccttttcttactttagagtgaattacatccataccaataatagaactttctaaatgagattgatgcttctttacaatttcaagcgctcaaatgagcttgaacggtctctaggaacatcaagatcaaaggctgtttttatatttgagtatttatcaagtatttttattaattcatctttagagaaagacttagtccatgctttcttcattatgataatttatcatatcattttttgaggtttacacagactattttacactctctttttttatgcattttcttatatcgttgtttcaattcatataaaaagttaaaaatatatactataaatgttattcatttaaatacttcatataaaaataaacaaagtttgacattggacactatactctaaaagaatcctaattaaggtgataaaaagcttttatttaagtcttgtgactgtaaaaccatctttctttaacatttttacaagtccatcgggtccaagtacgtgtccggttccaacaactataaaatattttttgcctgaggatatataactttttattttattatacatgttaatgtttctttgtaatattagagaattgtaataatctcgaacggctttattatttgaattctttccaaagtcgtatttttcaaaataattcacatcaccatttaagactgcattatattgagtattaaaagcttttttagcatcatcaggatagagcatattttcaagttgataattttgataagcatctccaccagcatttattgcggcagcttgagttttagcatcttctaaagcaacaatttttttgttatcatttttagctctttttagaaaatagtaatcaaagccgtagctgtttgcatcatcagataataattcactattaagaatggtactgtataaataacctagagtatcatttttgtaggtatcaagatttaaatttaattttttcataattggttcaatatgtttttttgcggcaggagttatatgcttgtataaattatcaccacttgagtaagttacatcttttccatatttacgtattgtactagtgtttgtaatgtcggtttctacaactaatgtagtggatttttcataggcattttcaacagctttagaaaatttaataggctcattttttccaatgtggattgtaccacccaaatataatgagtttccgttactttctactttgtaaaagatgccttctgattttggcttagtgtatttttttatattgtatacagcaattaaacttatgagaattaaaagtagtattgaaagtgtaattagttttttgtgatttttcattttataaatcccccaataaaatttagtatttataattggttttatatagttgattttacataattataacatatttgctactaattatatcagaaatatagttattgacatgatgagcaaaattcaaaagagatgaaaatattaaaagtatggaatatgaggaggttattcacaaaaatctatcgttcataataatgaacaagttattatctagatggtaaagcatatgacattatagatttatcaaaaggaggtgaaaggggaatggaggtatttaatgatccggatattgcagaagtaattatttaaaagagatatatggaagtattagaacaagaaaggaaagaggaagttaaaaagattgaaaaagaaaaacaagataaggatgagaaattaaaaagatacaatataaaaacaacgacaaatctgaatttgtcgtcgtttttatattgtagataagattacttttaaatgcatatattaaaacgtctttattttttaaaattgctttttacttttaaaaaaacgtacaaatactagcttgaattaattctatacgattttttttgatagaatcagatttttaatatataaataatactaattatttagccgtttaaaatattacgttaagaaatcctgaactaagcttcaatagaaattaaattttcggcattatttgcatctatatatattgattaaaaaatgacatctttaattaaaaaatagtatgtttgatttttggtaaaagctaacgattttaaaatatattcttctgaactaataaaatcgttgaagtctttaaatatttttcctaattcatacatagttttaccatatccaggataaccataacaattgttatgaccttcataagcagcgatttcaagaacccttattaaagcagattgactagctatgtctgaaaaatcaactccatagttaaagctatttcttatagtatttttagttctataggaaagtacatctctgtatttaataaaattaataacttgaactaaattattgaagggataaagttttacgttttttataattgggcattttcttaggttttcatatagtattataaaataaattaagaatatgaataattagtttgtgttaaaattaatgtaaaaaaatattattaactttaaaaccacaacaccttaatttttataagcttggtatcgaatatatataaaaaatttcattgtgaggtgaagatatgctttttaacaggtcacttgaagatcgtatacagaaggcgaaagaaagtaaagaagaattgaatagactaattcaagagtacaagccttttatagcaagccttttgcagaaaaaaacgggaaagtacttgcaatatggatatgatgatgaactttcaattggtatgatagcttttgaagaagctgttgaatcgtatgatagaaataaagggaaatttctaagttttgctaagcgagttattattctaagagctatagattattatagaaaaaatcaaaaatttaaaaatatagtttatttgcaaggaaattatgactcggaaaataatgatataaatcctataatgttcaataaggcaatggaacaatataaaaataagagtataaatgaaataagaagattagagattttagaatataaaaaggagcttagagaatggggaattgaatttgtaaacttagtacaagcttctccaaaacaagaaaagttaaagaaaacttataagaacattgctaacgttattgtacataaccaagacattcttaataaattgataagagtaaaaagactacctataaaagaaatagaaaagaatatatacataaatcgaaaaaagcttgaaagagggagaatatacatcatagcattagtaattgcagaaataggtgactatagattgatacgagaatatatagaatgaaggtgaaaatatgaagggaattgtaattgaagaattaaagtataaacttatcatactaacagaaaaaggagattttatagaaatagataaattaaatacaagagcaaaaatcggacaagaaataaatataaaaagtaaaaaaattagtacaaaaaaagctttaagaagatttgctttggctgcaactgcaatactaattttttttataataaattctttgatttatggcatgattttcacaagagaatatgtagttgttgatataaatcctaataataataaaaatgtggccatggaaatacattataattactttggaaatattataaaattacaggcagcaaataaaaaaggagtttctattgtaaaaaaaatgagaaacttgaaatttaaagctactaatgtagtaatcaataactttattagaacagcacaaaacgataaatttattgattctggaaaacaaaatacaatcgtaataacaatagcaagttctagcaaaagtattaatgatgaaagtattgatagttcattggaacattatattaaggaaaataagataaatgcaaggcccatgattgtattaggaaatgatattgattataaaaaatccaaacaagtaggcattccaatagataagtttattttaataaataaagttataaaaaataatccttcctataaattttatgatttaaataaaaaatctatagatgaacttattaacatagctaatcaggaagaaaattattaacagtatgcttaataggcaaaaaaactttaattttatttttaatataccttaaaaaaataataaagtttgcgtatttatatattgaaaggaagaaaatagtgcaaatataataaactagttaattggaggttttagtagtgaataagttaaaaattgtaaagtgcattttaattggttccatgatttgtagtggaattataactcagcaaacttttgcttcaactaatgacatgaattacaaagaaacatatggagtttcgcatattactcgttataatatgtcaaaaataccaatggagcaaaatgacttaaaatttaaagtgcctcaatttaatgcatcaacattaaaaaatatagcttcagcaaagggttatgataagaatggtaatttgatagatttggatgtatgggatagctggccattgcaaaatggtgatggaacagtggctaactaccatgggtatcatattgttttcgctttggcaggtgatcctaaaaatcaagatgatacttctatttatatgttttatcaaaagattggagaaaactccattgatagttggaagaatgcaggtaaagtgtttaaagatagtgataaatacgttgccaatgatccttatcttaagtatcaaacacaagaatggtctggttctgcaactttaacatctgatggtcaagttcgtttgttttacacagatttttcgggagtagcaaaagatggtggaacagatgctagtaatcaagttataacaactactcaagtgaatttatctcaaccagattcaaatacaattaatattgatagtgtaagtgatcataaatctgtttttgacggaggaaatgggacaatctatcagaacgttcagcaatttatagatgaaggtaaatggagttctggcgataatcataccttgagagatcctcattatgtggaagataatggccgcaaatatcttgttttcgaggctaacacaggaacaaacgatggttaccaaggagatacttctctactcaataaagctttttatggtagaagtcaaagtttctttaaaacagaaaaagatcaattattaattgatactaataaaaagcatgatgcttctttagctaatggggcactaggcattattgaattaaataatgactatacattaaaaaaagaaatgaaaccattaattgcatccaatactgtaacagatgaaattgaacgtgctaatgtatttaaaatgaatggtagatggtacctatttacagattcaagaggatctaaaatgactattaatggaataagttcaaaagatatatacatgctaggttttagttcaaattccttgactggtccatacaaaccattgaataaaactggccttgtactaaatttaaaccttgatcctactgatctaacatttacgtactctcattttgctgttcctcaaactaatggtaaaaacgtagtaataacaagttacataacaaatagaggaatgtattcagatcatcactctagttttgcaccaagttttctacttaatattaaaggaaccaaaacatctgttatatcaaatagcattcttcagcaaggacaacttactattgataattattaaatactagcctatgtcttaaataattaaaaaatgcagatattttatcggcattttttaattataagttttatataaacaagtaaaggaatgcattaagttgaagagaaaaaagcttaagttattaactattttaatgatttttacagttataatattaattgttttattatccttatatatacaaaataatagcacaataaaatctactaccactaaaaaacaaaattatagagaagtgtatcattttacagtgcctaataaatggaaaaacgaccctcaaaggcctgtattttttgatggagagtatcattactattatctgtataacaaagactatcctaatggtaatggtactgaatggcgtcaggcaacgtctaaagatttagtaacttggaaagatgagggagtttgtattcctaaatatacaaatgagaatggagatatatggtcgggatctttcgttgtcgatgcacaaaatacagcgggttttggaaaaggtgctattgttgctatagtaacacaaccttctgcaagtatggataagcaggaacaatttctttggtacagtacagacagaggaagaacatttaaaccctatagtaatcagcctataatacctaatccatgtacaaaagattttagagatcccaaaatcatttgggattttaaaaataataaatgggtgatggtcttagctgaagggacaaaaattggtttctatgaatcttataatttaaaaaactggcaacacacaggtgatttttttacaaacaatattggtattgtagaatgcccagatatttttatgatgcaatcaaatgatggaaattataagtggattttgggtactagtgctaacggtaaagtttcaggtgagccaaatacctatgcatattgggtaggaaattatgacggaaaaaaatttattgccgatataagcactcctaaatggttagactacggctttgattggtatgcagctgtgacttttgagagtgaaaatcaaagcaaaaacctaaaaaagcgctatgctttagcatggatgaataactgggattatgctaataacacaccaacaattcagaataggtttaacggaatggactctattgtgcgagaaatcactctaagtaaacaaaaggataatacatatagtttgctttcaaaacctattaaaagaatagaaaatattacaacatcaatagatcaatttaagcaaatttcagtaaagggattaaaacatcttaaggttcaaggtaaggcatatcaactcgatacagacataaattgggtagatgctaagaacgtaggaattagacttcgagagtctctagataaaaaacgccatattgacgttggaattttcactgaaggtaagtattcctatgtgaatagagcctatacaggaaatccagataaaagcaaaaaatatgttgaaagcagagcaccatttgatataaataataagaaggttcatctaagaatttttgttgataaagtaagtgtagaagtattcattgatgatggcaaaattacttactcaaatgaggtatttccgagaccagaagacaaaggaataactcttttttctattaaaggtaaagccgtctttaaaaatattacgattaagcatattgattaaatatatattttgaaaatatagaacgacaaattaaatacaaaatattaaaatgtaggagaaatatatttgaaaacaagaaaaacttataaaatgatatcttcgctaatggttattttggcaatactaacaattccatttttaatacttagacataacacaggctatactagtatttggtcacgccagcaggcgcaaaatttcaaatgtacaaaagaaaacacagcacctaatatcaatccgaattttaaacttactgcccctaatctttgggtttgggatacttggccgcttgtaaaaaaagatggatctttagcagtagttaatggatacaaggttatttttgctttgactgcatctagaaatgtaggctggaataaacgtcatgatgttgcaggtataagttatttttgctcaacggacggtgaaaattgggtatacaaaggactagcttacaatgtggaagatgctcttggatctagacaatgggcaggttcggcaatactcgatgaaaatggaatggttcaatttttttatactgccacaggtagaaaaggagaagcggttagaacctttgagcagaggttagttaaaactaaatttagtataaacgttgataaaggtggagttcatattacgaattgtagtaaacatcaagttattcttgagccagatggtgtatactatcaaacaatgcaacaagcaaaaggacccataatatattcttttcgtgatccatatttttttgaagatcctaaaaccaaaaaggactacttaatattcgaaggaaataagggcggaaaaattgaaaaaatgaaacctgaaaatataggtgataaattatttcgaaaaaatcatatagcaccacgaggagtagaaaattttaatgggaatgttggtatcgctgttgcccaaaataaagatttgacaagatttaaattgctaccaccactacttgaagcagttggcgttaaccagcagcttgaacgcccacaaattgtaatgaaaaaaaataaatactatttatttactataagtcacaaatttacttatgctcaaggattaaatggtgtagacggtttatatggtttttgtggcaattctttgcgtagtaattacaaacccttaaacggaaatggtcttgtaataaccaacccaactaatgatccatatcaaacatactcatggtatttagtatccggacatgatgtcttaagttttataaatgagtatcattttaatgggcagcttagatatggtggcacctttgcaccaaccttgcaaattagtttaaagggatacaaatcaaaaattataggaaggcttggggaaggagtagttacgcctgcacattagttactaatattatttttatgtaagtaaaacttaagaagatattcagagaacttattaatcaaattatatttagagaactaaaaaactatctatagtgactttttgtttctatagatagttttttataccatcctagtatagcttatgaatctatctataagaataatgatataaaaaaatgtcaaattataagcttatgtttaatgatgctatgaggtatatttaataactttttacactaaaaatgtattaaatatacttttatgtatttattttttaattatagtgatataataaatgtagagaatatattctttaattaccaaattcatcaacacataacaaaagtgtaggagctcccattataaatcgatgcatgcattaatataaatttgtatataggaggagactatatgaaaattaagggtattattgcaatatcgatgagtatactattaattgggtcaattagtagtgtagttaaggcatcaagtaataataaaagactacaaaatttaacttataaagaatttcaaaaattaaaattaaataaagactctaataagtcattggttagaacagataacaatgaaaaactttctttagatgatttaaagaataataaaaaagtaattccatttaacaaaacaattttaaaaaataaaataaaattaccaattattaaaagtggacaagataattcggtatctaagtataaaggaaatagtgttgcttcagcagcaggagataaatcaaataatgcaccagttgctaaattggatccatatatacttaatccggagtcattaaaaaatggagaaattacaacaaatacacaaattgcttggatttggtctgacacagatgccgatggagatgctttgtcacgtgcagtaggtggtttcccaagtgcatatatattaggcgttttacaggataataaaggttttgttactcaatttaccaacgctggtgattttgatttatactaccaggtaacggattctaaaggagctaagtctaatattgttggatattctatacatgttataccaccagaggattaccaagcttttcaaggtacctttcaatctacaactgatgtaaaaacatataatgtagcggttgacttttctaaaatggatacagctgcaatatgtttgacaggaacaagtaaagattatatgaatttaaaaatatctgatcaaagtggaaacgtagtgcaaaacgtatataattacgataaaaagtgggtatatattaacaaaccctcttcaaatgcaggaatttgtaattatacaataacaataacaccaactgtattgtcatctaatagcacatataactcctatagacttatgattggaaataaaaatgatgttgaggctatgcttagtggaatacaaaacactattatattagataaatatacaaatgaaaatgtaaaacagtttattcaagaatatactcctaataaaaatcaagaatggtttaaatttaccgctgatggttcaactgtaataacattactaaataattatccagaattaagattccaagttagggatacggaaaatttacaagttctttttgatacaaatgatcctaataatgcgtcaacacataggagtcaatactgtgggcttaactataaatatgcagaaaaagcacgattaaatacaacagctggtcaagattattacttagttatatattctccaagcttaatacaagatacacctattttaaatgatgaaatacatttaacagttggagatcccgttttaatatacgatagtacaacagcttatgcagataactatattacagggcctactacaggatattcttctatagcgaatataaacgttacaaatgtaccaacaactgcagctgtaaaagatatttatgtaagatcactaaacgatgtagcacgcgtatcagattttaattactggaaggttatggctccaggcgaatctttctggagagattctggtcaacagtgtaatataggtatagatgtcaactatgttgaaaatggaactaacaatgttcaactaatgggaacttggcgttttgtatttcaagcaggagttgatcctataagtataattccagggttacattttgactatgtatatgaagcaggagattaattaaattttatcatatattatatactttaattagttacatggtcgctttattcaggcgaccttttttatattggatgatttaactgattgttatgtatttgatttagcaagaaatttacataactaaaattataaaaaataaacatataataacttttgcttaaaaaaccacaagactttaaaatttcatgttttgacattatgctgcacgtattataaaaacataaatatgtcaataatttgtaaatttatgactgtacaataaacatttgtaaccttaatatagtataatttaagataatattaattttatttttattttatagtaaagcaatcctgcattctataaagctaataattgaaatttatctacaagaggaggaaacaatggatagaattttaacatttgattgttatggaactcttattgataccaaacctgtttttgatgccatatctaatattgcaaaaaataacattttaaattcgaaagatgctgtaaatatctatgtgaattatgaggataggcttatgtatggtgaaacgtatatcccctatgataaattaataaaacaagttttggagtattgtgatatggagttagttactaatgtttttagcaaatcttatgatgaaattatttcagtacataaaagactaaaaccttttaaagaggtagtagaaagccttgagaaaatacataaaaaaggatatgaacttgctctgatgtcgaactctgtgcatgatattattgattataacctagatgcattaggtaatgtttttaataatgtttttctttcagaggatattcatgcatataaaccacagcttaagttttttaaatatgttgaagaaagattagaattaaaacaaaaaaaacattgtcatattgccaagggatattggtgggatattgtaccctgttcaaaattgggctggcgtaaaatatgggtgaaccgagagaataaaaagggcaataagtgtcatgagccatatgaagaggtacatacgcttgatgaagttataaacttaatatgaaattaaaagaagggaggtaattatgaaaaagctagttgagataaaaaatgtaacaaagagttatgggaaaaaagtcatattgcaaggtttcaatatgacaatcaataaaggtgattcagttgcaataaaaagaagtaaatatcattaagcatacttattttatattaagcgttgactttgtatcaaaatgatgctaatatagttttaatatgatacaaagcatgtacttgtagtaaggagagaaaacataaatgagagacatgaacaaaaaaaatagaaatggattaactgaaaaagaatttttagatagatatgtacccggggattatgaaagaccatccaatactgtcgacatgttactttttactgttgatgatgtacctattgaaggtaaagatcctaataaagcattaaagatacttttaattaaaagaggagatcatccttatatgggatgttgggctgttcctggaggatttgtaaatattaacgaaggattaagctcagcttgttatagagaacttaaagaagaaacaaatgtagaaaatgtgtattttgaacaactaaagacatttggtgatgatgtaaatagagatccgcgtatgagagttatttctgtagcctatatggctttagcagataaattaagcataacacctaaggcaggggatgatgcggatgacgcaaaatggtttacagtaaaaaagagatttatatcatcaaaaggatttggtatagataaaattgatacctataatattttattaacttcagatgatggtgaaactaaaattggatatctggtaactgaaaaatttgaaaaaaatggtgttgttacaataaaggtgccttcatatagacttttggagtggagtaaagaagagcttgcatttgaccatatagaagaaatagattgtgctttagaaagattaaagaataaaattgaatacactccaattgctttttcacgacttcctaaatattttacattgagagaagctcaaaaggtctttgaagctattcttaatttagaaaagcctttaacaagagctaactttagaaggaaaattaaaaagatggtagttgaaactgaaaaagaaaagataacatctggaagacctgctacttgttatacatttaatgaagattggcagcatacttttctagatgaataaactgaaaggattgtagttataatgggtaaatttgaagaaaaaatattaaatatgtcagaagaaataaaagggaaatttgttgatttaaatgatttagataaggacaaaacagctatagttattgtagatatggtaaatggctttgttcatgagggagccttatcttctcctagagttgaaggaatagttgatgaaattgtaagaattaatgagaaaaccctaggaaataaaaaaatatttttcttagatgagcatactaataattcaacagaatttaaaagctatgctaaacattgtttagagggaagcttagaagcagagcttattcctgagttaaagaatgaagcactacttgatagtaatacagtaatgatacctaaaaacagtgtaaatggttttcatgcaccaggttttaaaaagtggcttgaggaaaatgaatctcaaatagaaaattatataatatgtggatgcgaggttgatatttgcgtttcaaattttgctaacactttaaaaacttactttaatcaaaaaaacatggataaaagaatcattattccaagtaatgctgttgaaacatttgattttggaacacatgacggcgatttaatgaaaattatttctttgtgggaaatgcagtcaaatggaatagagattgtggatagagttttataagaatatactttgctctttaacttagctttatttttatacaaagttaaagagcaaagatattgacaaataaatactatatgatataatgtttgtatcatattggtacaaatggaaaatgagaaagataagaacaaattttttttatctttgctttgtatcaatatagtacaaagtaaaaagaggagatattttgattatggaagattatttgacttatatattaaaagaattaatgaaaaacaaaaggcttaataaatttgatggaattgttagagaaaaaaatagaagcgtttatttaaaacatggcagggtttatgaagagtatagtattgatttagtattttctattgatacagacaactattgtaaagaaacaattgcttttaccattaaagttaattcattcaactcaaaaattgaagtaacaaaacattttacttcagaacatttaatatttagtataaattcaattgattgtgtagttctgtatgtagtaaatgaaataattaattttaaaaatagagataaacaaattacaaattatttaaaggcatcaaatgattaaaattaaattgataggagatctgcaattatgaataaaataaaaaaatttaatgttaaagatgatagaaatttatctatgctaatggatttttatgaattaaccatggctaacggatacttactaaaaggattcggtgataagatagtatattttgatgtattttatagaaagaatccagatggagcaggctttgccatagcagcaggattacaacaaataatagattatataaaaaatttaaaattctcagaagaggatattgagtatctaaaagaaaaaaatatgttttcagaggactttctaaaatatatgaaaaattttaggttttcagggagcattaatgccattccagagggaacacctgtatttcctaatgaagcacttataacagtaaaagcaaaggccattgaggcacagttaattgagacaatgttactaataacaataaatcatgaatgtctaatagctactaaaacaaatagaattgttagagcagcaaaaggaagaccggtattggaatttggtgcaagaagagcacagggatatgatggagctgtatacggagcaagagcttcatatataggcggagcagcaggaacagctacaacactttctgaacaaatgtttaatgtgccagcttctggaacaatggctcattcatggattcagttctttggagatgaatttgaagcatttaaagcctatgcagaaatttatcctgacgcatgcactttacttgtagatacctataatgtactagagagtggtattcctaatgctattaaagtagcaaaagaagttttagagcctatgggaaaaaggttaaaaggaataaggttagatagtggagatcttgcatatttgtctaaaaaggtaaggaaaatacttaatgcatcagggcttgaagactgcaaaatagtagtatcaaatagtttagacgagtatataattgaagatcttattgcacaaggagctaaaatagatgtgtttggtgttggtgaaagaatgattactgctaagtctgatcctgtatttggcggagtttataaacttgttgcagttgaagaggatggacaaatagttccaagaattaagctttctgaaaatgctgaaaaaataacaaaccctggttataaaacaccttggagattgtatgataaagaaacaggaaaggccatagcagatgttattaccttagctcatgagaaaatagatgagaataaggaatatactatatttgatcaagagaatatttggaagaagaaaaaaataacaaaatttgtagctagaaagcttcaagttccagtatttattgatggagaatgcgtgtatgaaagcccaacacttgaagaatctagagagtattgtgaaaagcaattagatacgctatgggatgaagttaagagatttgttaatcctcataaatattatgttgatttatcaatggagctatggcatgtaaagcaggaattaattcaaaagtatagagttaaataaaatgcatagcaataatattatattggtatacggaggggcttttaatcctccctcagcttcacatattactttagctaaacaattattaaactatactggagcaaaaaaactaatgtttgtaccagtaggaaatcagtataaaaagaaagaattaatacctgcttaccatagaataaatatgcttcaaattgcttgtgaatgcaataatagattagaagtaaatacaactgatgtggattttaaaagaaggctgtacactatagagacattggaaattataaaaaaacaaaacagtgataaagatatatattttattataggtacagataatctcagggatattctcaattggaaacattggcaaaggcttttaactgagtataagataattgttatggataggggagaagatacgatttttaaagtatttaaggatattcctatcttaaaaaaatataaagctaaccttattcaaataccaggattattagttaataatataagttctacattaataagaaacaatattagacaagataaaactattgaacatttaacaataaagaaaatcattaaatatataaaagaaaacaatttgtataagtagatgattattggcattgatttgaaatttagctagataaggggagatagatatgcaaatgaagaaagattttggatatataagagttggtgttgcttcctgcgaacttaaggtagcaaatccaaattataatgttaaaagtataatttctattatgaaaaaagcttatagaaggcatcatattaaagtgttagtatttcctgaactttgtgttacaggatatacctgtggggatttattcaatcaaaatcttttaattaagagggctgaaaatgaattaaataacctattggtttcaacatcaaatataaatatgataactgctgttggcatgccggttaaagcggataatcagttatttaattgtgcagttataattaataatggaaatatacttggagtagtaccaaaaacatttatacctacatataatgaattttacgagaaaagaaattttgcaggcgctatttcaaggataagtgatgaaattattctgtgtggaaaaaaagttccttttggtgaaaatctgctcttcaaagacatctattcagaactttgcataggtatagatatctgtgaagatttatgggttaacatacctccgagttcttatcatacacttaatggcgctaatctaatattaaatctatctgcaagtgatgaaattgttgcaaaatcagattatagaagggatcttgtaaggcttcaatctgcaaaatgtattacatcctatgcatatgcttcttcagggcaaacagaaagtacttcagatttagtattctctggacattctattatagccgataatggatccatacttaaagacataaaatttgaggaggcttcatatgtcaaatatgcagatgtagatatagaaaaactaataagtgatagaattaaatttaatacttatatgggtagaatagaggataaagaatatagaacaattaactttcacttaggttataacgagaacatgcacttagaaagatatgttgaggcttcaccatttgtaccttcaaataaaagtaaaaggaacataagatgtagagagatactagatttgcaagcttcaggactatatcaaagattaaataaaacaggtataaataaggctgttgtaggtatatctggaggtttagatagtaccttagcattacttgtaatagttgaggcttttaaaaagcttaaagctcctatgaaaaatattataggcattacaatgccggggtttggtactactagacgtacttataataatgctgtagagcttatgaaaaaattaggtattacaataaaagaaatatctataaagaaagcttgtatacagcatttcaacgatattggacaagacttaaatacccatgatactatttatgaaaattctcaggcaagagaaagaacacaaatacttatggatatagcaaataaggaaggtgctattgtagtaggcacaggtgatttatccgaattggcactggggtggtgtacttataacggtgatcaaatgtcaatgtatggtgtaaatagcagcataccaaagactttggttaaatacttaattatgtggtatgcagaagcatcaaaggacaatgatattagaaacatactactcgatatttataacacgcctgtaagccctgaattgttgcctcccgataaagagggtaatattaagcagaagacagaggatttaattggttcatatgaattaaatgattttttcctatataatatgcttaggagtggctatgaacctttaaaaatattatatttagcaaatatagcctttaaagataaatattcagaagatgttatacattcagcattaaagaacttttataaaagattttttactcaacaatttaaaagaaattgtatgcctgatggtgtaaagattggctctgtttcattatcaccaagaggtgacttacgcatgccgagtgatgcttcatatggattgtggatggatgaattatagactatatctatagctttccgattatattaaatatctaattgcaagtttgtaaagtttagaaatactagtttttactatagtcttgtttaaaaataaaattgtaatataactataaataaattgatagaaaccactaaatattatataaaaagtatcaaactaggtttattatataaatttattgaacaaattcattattaactatgatatactaagggttatagataaaggtctacctattaatagctttataagaaacatattgacaaggagagtataaaatgagaaagaagaattttaaacttggattaggtacacaaataattattgggcttgtactaggaattatagttggtattgttttttatggaaatacaacagttagtacatatttaaaaccattaggtgatattttcataaatctaattaaaatgattgtaattccgattatcttttctacgcttgttgtcggagttgctggtggcggaagtggaaaaacagttggaagattgggtctgaaaactatagtttactttgaattagtaactacaacggcaataatactcggaatagtttcagctaatctatttcatcctggaacaggtataaacctaagttcactttcggcagctgatatatccagttacatgaaaaccactaaaacagctgaaaatagtagcctgataaatatgattgtaaatattgttcctgcaaatattattgaatcctttgctaaaggagatttgctttctgtcatattcttttcagttatgttcggactaggagttgcagctattggagaaaaaggaaagcctgttttgaatttatgtcaaggaatttctgatgcaatgttttgggtgactaatcaagttatgaaagttgcaccaattggcgtattcggattaatgggagtagctgtttctaagttcggagttaaatctttaattccacttgggaagttaactattacaatttatggaactatgatatttttcatctttgtaatacttggtgtaatttcaaagtttattgttaaggtaaattttatttcatttcttagagttataaaggatgaaattattcttgcatttacctcagcaagttctgaagcagtattgcctaaaataatgcagaagaaggagaaatttggctgtcctaagggaattgtatcatttgttattccaacaggttattcatttaatcttgatggatcaacactatatcagtctattgcgtcattgtttatagcccaagcttatggaattcacttatcgttggcagcacaagtcaaattagtgataattctcatgattacatcaaaaggtatggccggtgtagcaggagcatctcttgttgtactattagctactttaggctcaatgggtattccagtagcaggagtggcatttatagctggaattgaccgtattcttgatatggcaagaactgttgtaaatgtagttggtaattcattagcctctgtggtagtatcaaaatgggagcgcgtatatgataatgctcaaggtgaaagatatgtccaagcaataaataataaatttgatgttaatgaagtaaagtagtttcctatataataaaattggcctactttctttaagttaaaagctgtttgtaaattactacaagcggctttttttattagagtaaaaaattatgataatctgattaataaagtttatataattactaaggtttactataaaaaaaacagtacatattaattgagattatataataaattataaagtattataggtaagttttttcattttgaataaaaaccttttttatgaacataattatgcataaagaatttacataaaaaataaatatttataaaaattgtattaggagaacaattaaatgtatgataatgatttatggtttgctacaattaatttgccatataggcaaaaactagagcttttaaggatttataaaacttcagatgagattttgtataacttcaaaaattcagagctaattcagaagtataaatttgatattgagaagataaattatataaaagatgaaatgaaaaaaagtggaatgaaaatagttttctggaatgacgatgattatcctaaagtattaaaaaattatgatgacatgccttatggattattctatatgggaaatattaagaaattgaatgaattgaattataatgttgcaattgtaggttcaagaagatgtacacaatatggtaaggatattacaactataatttctcgtgagatatcgataaatggaataggaattataagtggtatggccagggggatagatacatatgctcacaaaatatgcttggaaaataacggatatacttgtgctgtacttggctgtggggctgatgttatttatccaaaagaaaataaaaatttatattgccaaattattagaaatgggtgtataatttctcaatataaaccaaatacaaaaccgctgccatataattttccaataagaaataaaattataagtggacttagtaatctagttttagttactgaggcagatattaagagtggttcgataataacagcgtcctctgctttagaacaaggtaaggatgttggagcagttccaggatctgtcttctctaaaatgagcaggggtactaacaaacttattcaagatggtgcacatgtaataaaagatattgatgacgtatttggaattttaaattttcaaaaaattaattttaaaaaaattcgaaataattcatcatatagctcaatgcctgaaaatcaaaggcaaatatatgacctggttagtgataagcccattcatgttgatgatataaaacgatgtcttaatattgacattcaggaactttatgagttattatttgaaatgcagttgaaaaataaaatattatgcttaagtggaagttattatgtaagagtaaatgattgtttgtaaatatataaactttattttggaggggataagatgggacagaaattagtaatagtggaatctccagccaaggcaaaaaccataggtaaatatctggggaaaaactacattgtagaagcatcaatggggcatgtaagagatcttcctaaaagtactttaggagtagatatagatgataattataatcctaaatacataaccattagaggcaagggtgaattattggataaactaaaaaaggcagcaaagaaatgtgacaaaatatatcttgcaaccgaccctgatagagaaggggaggctatctcttggcacctttcaaaggttttaaagatagatgaaagtgaaaagtgcagaatagaatttaatgagataaccaagaatgcaataaaaactgcaataaaatgtccaagaaaaattaatattaatcttgtagatgcacagcaagcaagaagagttcttgacagattagttggatataagataagtccaattttatggagaaaggttaaatggggactaagtgcaggtagagttcaatccgttgctcttaaaatggtatgcagtagagaaaagcttataaatgatttcaaaccagaagaatactggagcatagatgctcaagtatataaacaatctaaaaaagataagtttacaataagactaacttcatttaaaggtaaaaagataaaaataaataatgaagaagaaaatgaacaaataataaatagtattaagaaagatgagtttaaagttgaaaatgtaaaagagggcacaaaaaataagaatactcttccaccatttactactagtactcttcaacaggatgcaaataaaaaacttaacttttcaacaaagaagacaatgtctgtagctcaacagctttacgaaggaatagatgttaagggacatggtacaatcggtcttattacttatatgagaacagattcagttagagtatcaaaagaagctcaagaggcagctaatgattatatattaaatgaatatggtaaagagtatttacctccaagtcccaaattatataaaagtaaaaagaatattcaagatgctcatgaagcaattaggccaacttatatagagcttactcctggtatggtaaaatcaagtttaaaggatgatcaatataagctttataatttaatatggtctagatttatggcaagtcaaatggctaattgtattttaaatacgttatctattgaaataaaaaatggtgagtatacatttagggcatcaggtagcaatgttaaatttgaaggttttatgagagtttataagtacaatattgaagaagatgaacataatgaaaaaattccgttgttgcaaaaaggtgatttgttacatacagacaagatagatggcaagcagcattttactcaaccacctgctagatttacggaggcttcattagtaaaaactcttgaagaaaatggaattggaaggccaagtacatatgcgcctattatttcaactcttatcgatagaaaatatgtaaagaaggaaaaaaaggctatattccctactgaacttggaaatatagtagataatatattaagcgattattttaagcaaattatagatattgagtttaccgctgatatggaaaataagctcgataatgttgaagaaggaaaagaaaactggaaagaaattgttgatgaatactttaaacctttgaaggaagcaattgatattgctgaaaaagaagttgctaaaataaccatagaggatgaggttacagatataaagtgtgacaaatgtggcagaaatatggttattaaacacggaaggtttggagattttttggcatgtccaggatatccagattgtaaaaacacaaaacctattgtagaaaaattgaaagtaaaatgtcctaagtgcggtggagatgtaattgtaagaagaagtaaaaaaggaaggaaattttttggatgtagtaactatccagactgtgattttgtaagctggtttgaacctacagaagaaaattgcccaaattgcggtagctttatggttaaaaaatttagcaaggctaaaggatactatcttcagtgctctaaccaagagtgtaaatatgaaaaatctaatcctgatcctgacaaaaaataattgtattattatagttataattgtcggaattgtaaaaaataaggttgaataaaaaaaacatatatgatattatttttaatagataagttgataattcgaaatgttaagaaaaattgtaatgttttaatacaataatgataaggaaatcgggaggaaaagtaatgtccatactattaaataaaacacgtaagctaaatacaatactccaaaaatcaggaacagaaccagttattttcgatgatatatgtaatatattaagcgaagtgctagaatgtaatgtatacgttgtgagtagaaaagggaaaatactaggtaataatttttcaagtggttttgaatgtgaaaaattaaaaaaagaaataatccctactaagaaatttcctgattcctataatttaaaacttttagattgcaaggaaacaaaagctaatttaaagcatactgaattttgtacattctatgaaaatgaaaaatgtgagtttgaaaacaaagtttcaacaatagttcctataataggaaatagagaacgtttaggaactttagttttagctaggtttaccaagaagttcactgatgatgatttggttttagctgagtacagtgcaacaattgttggactagagatactaagatctaaaaatgatgaaatagaagcagaagctagaaaaagagctgttgttcagcttgctataggaactctatcttattcagagttagaagctgttgaacatatatttaacgaacttgatggaaatgaaggacttctagtagcatctaaaattgcagataaagttggtataactagatctgttattgttaatgctcttagaaaatttgaaagtgcaggagttatagagtctagatctcttggaatgaaaggtactcacataaagattttaaatgatagattattagaaggattaaagaaaataaaataattaaagaaaattcttgaacagataaagtgtatgtgatatacttacataggtaaaaatacacacactatccaatttgaaatctgtgctatgtgttatatagtggttttaaataaaagatagtggaggtaataacaaaatttaggaggaaaaattatgtcagttatttcaatgaaacaattattagaagctggtgttcatttcggacatcaaacaagaagatggaatcctaaaatggctccatacatatttacagaaagaaatggtatatatattatagaccttcagaaaactgtaaagaaaattgatgaagcttacaacttcataagagaagtatcagaacagggtaaggatattctttttgtaggaacaaaaaaacaggctcaagaagcaattgctgaagaatcagtaagagcaggaatgcattttgttaacaacagatggttaggtggtatgttaacaaacttcaatacaataaagactagaattgcaaaattaaatggcttaaagaaaatggaagaggatggaacatttgatgttttacctaaaaaagaagttatcatcttaagaaacgaagaagagaaacttgtaaaaaatttaggtggaatagtaaatatgacacaatctaacattggagctttatttgtagttgatccaagaaaagaaaagaatgctatttcagaagcgaaaatattaggaattcctgttgttgcaattgttgatacaaattgtgatcctgatgaagttgattatgtaattccaggaaacgatgatgctataagagcagtaagacttataacttcaaaaattgcagatgcaataattgaaggaagacaaggcgagcaattagctgagtagtaaaaataagaattgtgtatataatataaatattttaataaacaaatgaagaagatttcttcttcatttgtttatgtgaattgaagcataaaacggaggtatgaaacatgatttctgcaagtgcagttaaagaattaagagaaagaactggagccggaatgatggcttgtaaaaaagctttaagtgaggctaatggagattcagaaaaagcagtagaaatactaagagaaaaaggattggcagctgctgcaaaaaaagcaggcagagtagcatcagaaggattggttgttgcttatgtaaatgaagatggaaaaagcggagcaattgctgaagtaaactgtgaaacagatttcgtttcagcaaatgaagatttcaaagctttagcagaaaacatcgttaaattagcagcaaaaagtaattcaaacacagtagaagaattattagaagaaaactatgtagatggaagcagtaaattaaaagatgttataactgctttaattgctaaattaggagaaaatattaatttaagaagatttactaagttttcaaatgaaaatggaacaatccaaagctatatacatggtgatggaagaattggagttcttgttaacttaaacgctgataagatttctgatgaagttcatactttagcaaaggatatttgtatgcaaattgctgcagcaaatccattatatttagatgaaacttctgttgaccaaacagcattagacaaagaaagagaaatatacaaagttcaagcattaaatgaaggcaaaccagaaaaaattgttgaaaaaatggttgaaggaagaataaagaaatacttgaaggaagtatgtttattagatcaagtatgggttagagattctgatttaacaatttcaaaattggtggctaaaaaatcaaaagaattaagtgctgctatttccatagctgatttcgtaaggttcgaaagaggagaaggaatagaaaagaaagaagaaaattttgctgaagaagtacaaaaacaaatgcagcagagcaaataacatattggagaacactgcgtgttctctttttttaaaataaaatgatatatggtagcattggaggtacagtatgcaatcaataaaatataaaagagtaatgttaaaaatttcaggtgaagcgctagcaggaaccaatggatacggtattgatttcgaagtggcaaataggattgctaaagaaattaaagaaattgttgacttaggaatagaagttggtgctgtagtaggtggcggaaatatatggcgtggaagaaatggtaaaggaatggatagaactactgcagattatatggggatgcttgcaacatgtataaatgccttagcacttcaagattcacttgaaaacatggatgtggatactagagtccaaacagctatagaaatgaaacaggtagcagagccttttattagaagaagagctatgagacatcttgaaaaaggaagagttgttatttttgctggtggaactggtaatccatatttctctactgataccacagctgcattaagagctgctgagatagaagcagatgtaattcttcttgctaagaaggtggatggagtttatgataaagatccacataagtatgacgatgctattaaatttgataatctaacttatatggaagtacttgaaaaaaatcttcaggttatggattcaactgctacatcactatgtatggataataatataccaataatagtatttggtcttgatgtttcgggaaacataaggaaggccgttttaggtgaaaaaataggtactatcgtatcaaaataaatttggaggatttatttctatgataagtgatataattaaagaattagaagaaaaaatgacaaaaagtatatcagctttaaaaaaggaattaacatcaatgaaagctggtagagcaaacccagctatgcttgatagaattgaagttgactactatggaacaatgacaccattaaatcaacttgctaatatatcagtacctgaatcaagagttctcatgattcaaccttgggataaatcagctatgaaaagtatagaaaaggcaatattgatttctgacttggggttgaatccatctaatgatggtacaacaatgagacttgttattcctgaactaacagaagaaacaaggaaaaatatagtgaaaaatgtaaagaaagctggagaagatggcaaggtagctttaagagctatacgtagagatgcaaatgataaagtaaagagcttgaaaaaggataactctataactgaagatgaaatgaagagtgcagaaaacgatattcagaagaaaacagattcctatgttaaagaaatagataaaatggttgaagcaaaggaaaaagagattatgtccatatagctcgatatatattgcttatttaaaacctgcgcatttatgcaggttttttttatattaaatatatgttaaaatatcagtgtatttatatattgattggagagaatataatgctaaattttataaggtctgataaagacaaaggtaaaggcaatgataatgatattaatttttctaatataccaaaacatattgcaattataatggatggtaatggtagatgggcaaaaaaaagaaatctccctagaactatgggacataaagctggtggtgaagctttaaaaagaatagtaagagaatgcagtgatataggtgtgaaatatttaactgtgtatggattttcaactgaaaattggataagacctaaggaagaagttaacgcaattatgagacttattgttgaatttttaaaaagagaatttaatgaacttaataaaaataatgttattataaatccaataggcaatattttaggattgccagaggcttgtattacagcattaaatgatgcaaaaaataaaactaaaaataacactggtcttatgcttaatctagcacttaattatggtggcagagatgaaatattaaatgcagtaaagaatatatttgcgagttatgaggaaaataagatatctaaagatgagatatttaacttaagtgatgaagaattctcttcgtatttatatacaggttgtattccggatccagatataataatacgtccaagtggggagaaaagattaagtaattttcttctttggcaatgtgcatattctgaattttggtattctaatataaattggcctgatttttctatagaagatcttcatacagctataaaagattatcagaatagggatagaagatttggaggcgtaaaataatgagtttaaacaaaagatatttgggtgcagttattctagctcctctcctaataattttatttttaggaggtatatatcttaaaatatttgtttttgctttatcgatgattggattatatgaatattataaggtatctagggaagctaaccttaaacctatttctattgttggatacttgctttgtatagcttactatgttttaataaactataaacttaattacaagtttgtactttttatgatagtaataggtatatttattatgctttgtgtccctacattggatactaaatataattatatagatatttcagttacaatattaggatttatatatgtagcagttttctttagttttattgccctaacaaatgatttgaagtatggaaattatttgttgtggattatattcatagcatcttggctttgtgatacattagcttattattcaggaagaatttttggaaaaacaaaattatgtcctaaagtaagtcctaaaaagacaattgagggttcgattggtggagttctaggaagtgtaattggatgtactgtttatggttttataatttctaaatatggagttaatatagctatttatcactacataataataggaattttatgcggcgttttttctcaattcggagatcttgcagcatcatcaataaacgaacatgctcaagttaaagattatagtaatttaatacctggtcattggaggtattttggataggtttgacagtatattatttacttctgtagtagtatactattatttaagctttatagtatttagataaaatttattatataaggaggaaaatactttgaaacttactagcattgaaaataacattgcagaggacagaaagcatccttttttattagtaaaaggtaaaaacaacactggaaaaagtaccattgcagcttgtaggagtattttccttaagaataattactgcatatcaagtagtgataaaatattaataattaataattctaagcagagcttaaataaatttaataatatatattcatctatatatgacgacgcaaactttaaatattcaactttacttgcaccagaaaaggacgtaatagaaatttccactttggatgatgttatggacagatatcttccatcaaacttaaaacttgttgatgaaaaagagacaaattctatactgaaatcatgcatagatgatttgaaaaagctttatccaaatatcaaagtattaaatgatacctatattgagttcctaaaggatgaaattcaatggataaaaagctgcggttacaataatttagatgtataccaaaatatagcacgtactggaagaaatttattaaaaaaacatgtgaatgtcagacttaataagaattcaaacatgagaaaatgcatttttgaacttatgcttatgtataatgataaattgaatagacaaagacaatttgatactgtagaaaaaattaaagctgctattaaaaattctcgaaaaagcagcttaaaaaagtatacacatataatagttgatggtattgaaaatttaactaaactgcatgttgattttattaattctataagaaaaaattcagagtactccactacgctttttacatataatagtgatttaatagaaaatagtacctcgtggttcataaacaaaaaaaacatacgtttagtaagtgaaactaaaataaagagttatactttgaaaaacagttataaaaacgaaaataccactatacctttaaattctctagaaaaattcacttacaaagatatcaagcataaaacctcttttgagtttattagggacaactatgatacttcaaaaataattttaaccgggaattcagcaaacatagagtatggtgaaaatgaaatagagaaaataccaatatttaatgaaatagctgctggtgaacctatacttataaattcacaaattgaggacaagttctatcttccaagatactgggttaaggatgctaaaaattgctttatactaaaaattaagggagatagtatgataaatgcagatattaatgatggagattgtgtggttataaaaaaaacaggtgcagcagagaacagagatattgtagcagttaatattgatggtagtgcaacgcttaaaaggttaaaaatggataaagatggtattgcttttatgcctgaaaatgaattgtatagtccaataaaggttactgaggatgaacaggtaatgctaattggaattgccgtaggtgtcttaaagtctaattaaaaataatataaagtgcttctaatgaatattaataactataaagttttacatgactttatagttattttattttttgagaggtaattacattgaaattttataaaaaattaattgaatgcataattcttttattattttttgtagtctttacgttgtttataaagtactattttaaaccatttcttagtattgttattttaactatactgtgtagcccaatatacaatcttttaagtaaacataaagttttcggggatagaataaatgctgtattaagtattattgttataaatgtaatgatatttttggctatttttttaataggaaattttattgctcagaaattaaacatatatcttcaacattatcataatgtattagatattaataaattgcctataataggtgaatctaatgttaatattttattaaataagattaatgtatttgttgacaaattatttaatgcagatttttttaaaaaaagtgcagtatatactactgatggcatactaacatactttgtttctatcatgtctgtttactttattttggtagataaatatgatatagttaatttagctgagaagttatttactaaaaacaaggtacatatacttatgaaaaaatttagtgacataaaaagtttgttaagggtcgaaacttttttagtacttattaccacgattcaaaccataattggattcttcgtattgggaatagaagactgctttatgcttggaataatatgtggcattttagatatattaccttatgttgggactataataatttttattccacttataatatacaagatgtatgaaaaaaattacgttactatatttggtcttatagcactctatatttttcttcaagtatcaagacaaattatggagactaattttatgagcagtaaattaaagattcatccacttataatactaatatctgtctacataggaattaaggcttttggaataataggattattcatagcgccaatttatgtgataaccgcaaaagaaataatattgtcttcatagaacttaggagtgatataatgaaaaacatatctatattaggagctactggatcaattgggacacaaactcttgatgtaataagaaatgacagcgaagcatttaaattattagctgttagtgcacatagtaattttaaaaagatgatagagataatagatgaatttaaacccgagcttgttgttatggtagataaattagcttataacaaggttcttgattactgctgtgaaaaaaaactaaaaacatctgtaaaagttggatatgaagcgtttaatgaggtcgcttcctacaaagatagtaatattgtagttacatctatagttggcatgataggacttattccaacactggaagctataaaagctggtaaagatatagctcttgctaataaagaaacccttgttgttgctggagaactagtaacaaaagaagctaagaaatatggagttaatatacttcctgtagattcagagcatggtgctatatttcaatgtcttcaaggaaacaaatataaggatataaataaaatacttttaacagcttctggtggaccatttagagggaagagttttgatgaactcaataatgtaactttaaatgacgctttaaatcatccgaagtggactatgggtagaaagataacaattgattctgcaacacttatgaacaaagggcttgaggtaatagaagctcactggctattcaatgttgactatgaaaaaatacaggtgttagttcatcctcaaagtatagttcattcaatggtacagtataaagatgggagcgttatagcacagcttggacccacagatatgaggcttccaatacaatatgcactaaattatccagtaagaaaggaaaggattgttgagcctgttgatttttactctactccagacttgcatttcgaaaagcctgatatggataccttcaggtgtttacgcctagcttatgatgctggaatggctggaggtataatgccagcaattttaaatagtgcaaacgaatatgctgtagatttatttttaaaggataaaattaaatttacaaatattcaagaaataatagaagatgcattaaatcattttgagaatgtaaataacttaactgctaatactataataaataaaagtaatgaagttacaaaatatttaaagggcaaaattggattttaggagtgataatattgagtttttttaatatagttattgctatattagcttttggtgtactcatattaatacatgagttaggacattttgtactggctaagttaaatgatgttaaagttgaagaatttgcaattggtatgggacctaagcttttaggtataaaaggtaaggagacacagtattcaattagagctttacctataggtggttatgtaaaaatgctaggtgatgagagtaaaagtgatgatccacgtgcttttaataataaatcatctgcgagaagacttagtatagttatagcaggacctattatgaatttaattttagcagcggttcttttttgtatagtcggaatgtcagaaggcatagcgttacctacagtaggcaaaataagtgccaattccccagcacaaaaaattggtataaaagctggagacacaatagttaagataaacaattattcagtacatacatgggaagatatttcttttaatatggcacttaacaagggtgaaggcattaagttagcgttaaaaaataatggaacgataaaaaaagtgacgctagttcctcagtatagtaaaaaagaaaagatgtatcttattggaatttccccaaagtttatagataaaccaactataattgaaggagctaaatacggtacttctgaaactgtaactatgattaaaacagtatatttaagtcttaaaatgatggttactggaaaggcatcagcaaaagatgtatctggtcctgtaagcataattaaagttactggagcagctgcaaatgcaggattcataagacttgttaattttattgcttttataagtgcacagcttggagtaatgaatcttttacctatccctgctcttgatggaggctttgtattcttattcttattccaaatgataacaggaaagaaagttgatgatgataaagtagggtttgtaaacactataggctttgctttacttatgatattaatgattgtagttacaattaaagatgtagtgtatcctattaatttttaatcttgaagggatgatagataaatgcagagaattgagactagaaaagttaaagttggaagtgtatatgtaggaggagattctagggtaacagtgcaatcaatgacaaatactgatactagagattctaaaaagactatagaacaaattaaaaaattggaaatagccggctgcgacatagtaagatgtgcggttcctgattttgatgcagcttcttccttaagtgaaataactaaaaatgttaaactacctgtagttgcggatatacattttgattacagattagcacttgaagctataaaaaatggagtttcagctttaagaatcaaccctggtaatataggaagtaaagaaagagtggagcttgttgcaaaaagtgcaaaggaaaagaatattcccatacgaataggagtaaattcaggttctcttgaaaaggacattttaaacaaatacaaaagagtttgcagtgaagctttagttgaaagtgccctaaatcatgtaaaaatattagaagatgtaaattttaatgacatagtaatatctataaaatcttctaatgttcaaatgatgatagatagctacagattaatttcaaaagaagtaaactatccactccatcttggtgtcacagaagcaggtactatatggcgaggaactataaaatcctccataggtataggaactcttttaagtgaaggtataggtgatactataagagtatctcttacaggagatcctgtagaagaagttaaggttggtagagaaattttaaaaacttttggatatcttaaaagcggagtggaatttatttcttgtcctacttgtggaagaacttctatagatcttataaaaattgcaaatgaagttgagaaaagattagaaaagactaataaaagcattaaggtagcggttatgggttgtgttgtaaatggtcctggagaagcaagagaagctgatataggtattgcaggaggaaaaggagaaggtctcatatttaaaaaaggagaaataataaaaaaagttaaggaagaaaatctagttgatgaacttatgagggagatagacaatatgtagctttatattttttgataatatacaaataaacactgtgtacaaactcatgatatccatataatagcgaattaaattgatttatatggtatatatagctaattgttgatactaaaagtgtatatgttaatttatccttgaaatataaatttcaatatgttacaataatacgagatgttgaagtttactgatagatttgtgccaagagagtgggtagttgcccgctctttcattttgtattttttattttaagaattaaaaaactttaagtagcaaaatatatattgttaggaggggatttaaatgatagataaattaatcgaaattataagacctgttgttgaaagtttaggttatgaattttatcatattgaaattgttaaagaagacggtgaaagatatttaagagtatacatagataaagaaaatggcatatcccttgatgattgcgaaaaagttagtagggctataagtgatctgttggatgaaaaagatcctattccgtacagttattatcttgaagtatcatcacctggaatatatagaactttatttacagaagaacatttaaaaaaatatatcggaaatactgtagatattaagttgaaaagcagtcttgaaaagtcaacaaattattcaggtaaactaattgatgttaatgaagaagatatagtaatagttgtctcagataatagggaatttaagatccctagaaaaaaaattaaaaaaatttgtttgagtggggaattttaaggaggttaatacaatgaatcaggaattcatccaggcacttaaagaaattgtggaggaaaaaggaataagcgaggagctccttttttcaaccattgaagatgcattagtcgcagcatataagaaaaattacgctaaactcacagaaaatgtccataatgttagagtgagtatgaatagagaaaatggagaaatacatgtttattcacaaaaaaaggtagttcaagaaatagaggatagtatatgtgaaatttctcttgatgatgctaaaagtatagaccctaaatatcaattggatgatatagttgatatagaaataactcctaagagtttcggaagagttgcagcgcaagcagccaaacaagttgttattcaacgaataaaagaggctgaaagaagtctattatatgatgaattttcagaaaaagaatttgatataataacaggaactgtacttagaaaggataaaggaaacattttaattgatttgggaagaatagaagcaatcttaggtccatctgagcaaataccaggagaagattacatatataattctaaaataaaattatatattgttgaggttaagaacactacaaaaggagcacaggtggttatttcaagaactcatccgggtctagttaaaagattatttgaattagaagtacccgagatttacaatggaatagtggaaataaagggtatctcaagagaagcaggatcaagaactaaaatagctgtttattcccatgatgaaaatgtagatgctatgggagcttgtgtaggtccaaaaggaatgagagttcaaaatatagtaaatgaacttaaaaatgaaaaaatagatataataaaatggagtaagcttccagaagaatttatatcaaattcacttagtcctgcaaaagtattagacgtatatattgatgaagatacaaaatcagcaagggcaatagtagaagataatcaactatctcttgctataggaaaagaaggccaaaatgtaaggcttgcagcaaaacttacagaatggaaaatagatataaagagtaaatctcaatatgacagcgaagtacatgaataatttataatgctatatttttggtaaaggacggtgtattgtattgaaaaaaagaaaaatacctcaaagaatgtgcacaggatgcatggaaatgaaaccaaaaaaagagcttataagaattgtgaaaaacaaagagggagaaatatcagtagatactacaggaaagaaacctggaagaggagcttacatatgtaagagtatcgaatgccttgaaaaagcagttaaacaaaaaaggcttgaaaagaatctggaaattaaaattgatgaagagctttataataaattaagaaatgaggttacagatgaataacaaatttcttcaatttttaggtatagctaaaaaggcaggtaagttagttgaaggttataataaatgtgaagaactccttttaaaaagaaaggcagatcttataatactttcaactgatatttcagaaaatagcaaaaaaaagtttgaaaattattcttcgaagcacaatatagacattataaatgcattttcaagcagtgagctcggaaatatacttggtagtgatagtataaaagtagtgtgtattgttgataagaagattagcgaaaagttaaaaagtctattaactgaaaataattaaatgggggtgtataatgtgccaaaagtaagaatttatgaattgtcaaaagaattaggtagatcaagtaaggaacttattaacatacttcatgatgaatttggtatagttgttaaaaatcatatgagtgttatagatgaagaggatgcagaacttataaaggaaatgttatctgaaagtaatgatgaggataaaaaatcagatcttgtagaagaatacgaagatatgatttctgacagtataaaggttagaaaaaacaaaaaagttaagcaaaaggataaagataaggaaaataccgatgaggatgaagaagaagagcaagaattcgatgatgtaattgaaattgaaaatacaataacagtaaaagatttagctgataaattgaaaaaaccaataacagaagtaattaaagagcttatgtttatgggtgtaatggctgcaataaatcaggaaatcgattttgaaacatcatctaaagttgctgctaaatttaaggtggatgttatacaaaaagcagaagaagctgataaaaaggaacttaaaagtgagttcgagaatgagtttgaagaagatgaggatgagggcacttggataaaaagacctccagttgtaactgtaatgggtcatgttgatcatggtaaaacctccctccttgatgctataagaaaatcaagtgtaactgaaacagaagcaggcggaataacacagcatattggagcttatactgtaaaaatgaacgaaggaaaagtaacatttttggatactccaggtcatgaagcttttacagcaatgagagcaagaggtgctgaaataacagatgttgtaatattagttgttgcagcagatgacggaataatgcctcaaactaaagaagcaataaatcactgtaaagctgctaatgtaccaatagttgtagctataaacaaaattgataaacctggtgcaaacatagatagagttaagcaagagcttacagaacatggtttgattcctgaagactggggcggagatactatatgtgttcctgtttcagctaaaacaaagcagggtttagatagcttaattgagatgactatattaactgctgatgttatggatttaaaagcggatcctaaaagacatgcaagaggaacagtaatagaaggaaaacttgacaaaggaagaggccctgttgcatctttaatagttcaaaatggtactttaaaggttggaaattctataatagtaggatcaacttatggaagaataagagctatgtttgatgataaaggtaaaaaaatcaaatccgctggtccatctgtcccggttgagattttaggtctttctgatgttcctgaagctggtgataaatttaacgttgtaaaagatgagaagacagcaagaaacatggctaaaattagagttgaaaaattaagaagtgcaaatttagcctcaaaacataaagtttctcttgaagatttatacagtcaaatacaagagggaaaagttaaagaattgggcataatagtaaaggcagatgttcaaggatctgtagaagctgtaaaacagtcttttgaaaaactttctactgatgcagtaaaggtaagagttattcatggtgctgttggtgcaattacagagacagatgttattttagccagtgcctctaatgccataataataggatttaatgtaagacctgataataatgcatcagctttggctgaaaaagaaaaggtagatataaaaacttatagagtaatttatactgcaattgacgacataaaatcagctatgattggtatgcttgatcctgaatataaggaagaagttataggaaacgctgaagttaggcatatatacaaaatatcaagcattggtactgttgcaggatgctatgtaacttctggaaaaataactagaagtagcagtattagagtaataagagatggtattgtaatacttgaaggagaattggcttcacttaagagatttaaggatgatgctaaggaagtagctcgtggatttgaatgtggtttaactatagataaatttaatgatataaaagaaggagatgtcatagaggcattccaaatggtaaaagttaaacaagagggctaaaagaaaataatctgcctataaaggagagatattctatggctaagtatagagcaggaagaattaatgaagaagtaaaaaaagctataagtagtataattcaaaatgatataagagatcctcgtcttacatctatgattagtgtaataaaggttgatgtaactaaggatttgagatatgcaaaggcttatgtaagtatacttggtgatgaagctaagaaaaaagaaaccatggatatactaaaaaaaagcgaatcctttataagaaaagaacttggttatgctgttaagcttaggtatacacctgaagttataatagaacttgatacttcaatagaaaaaggaatgcatattgatgctattttagaaaaaattaaggggtccgacaaaaatgataatagatgatataattaataaaattaaaagcagtaataaaattgctataagttttcatatatcacctgatggcgattccataggttctagcttgggccttttgaatgggctaagaagtattggtaaggaaacctatattttaagcaaagaagtcgttcctgaatcctttgaatttttgaattttgctagagaaatcgatggaaatcactttgaggtagaagataatacagatttacttataactttagattgtggaaatatcgaaagattaaattttgatacttctgatatgataagtgaagataaaaaatacactgttattaatatagaccatcatgttacaaatgattcttttggagatttaaattatataaatacaaaagcagcatctgttggagaaattgtgtatgatttattatcaaaaatgaacatatcaatagatagaactatcgctgcatgtctatatacatcaatattaactgacacaggatcctttagattttcaaatacaacacttaatacacatgtggtagctggaaatttaattagtactggtctggattttagtgaaatacatagaaaaatatttgataacaagaaatttgaagctttaaagcttcaagctcttgtattaaatgatatgtatttaacttttaacaataagctatgtgtgatgaaagtaactcatgattttatagaaaaggcaaatgcagaggatgtagatactggagatttagtatcactaggacttaaggtgaatacagcagaggtatgtatgcttttaaaggaaaaagatgattgtataaaggttagcttaagatcaaaatcctatgttgatgttagaaaaattgcagagaaatttggtggcggtggacatatacgagcagccggtttatcaataaattcaaatattttagacgcagaaaagatgattctttctgaaatacaaggtgagctttaaatatggatggaattttaaacatatttaagccaataggactaacatcctttgatgtagtaagacaagtaaaaaaaatctccaaagaaaaaaaagtagggcatacagggacacttgatccattggcatcaggtgttttgcctatttgcattggaaaagctactaaaattgtggattttgtaatggaaggtaagaaaatatacgacgcagaaatgaagctcggtgaaataagtgatacttatgatagagaaggtaagattttaaaagtaaatcaagttacttcaagtgaaaataatatagttgaagctattatgagttttcaaggtgaaattcttcaagtccctccaatgtactcagcactaaaggttaatggtatcaaattatatgatttagccaggcagggaattgaaatagaaagagcttctagaaaaatacacatatatgcaattaagattttaagtatagatattccttttgttaaattccgtgttgagtgctctaaaggaacgtacataagaagtttatgttatgatataggtaacaaactaggatgtggagcattaatgtacaatttaacgcgagtgtcatccggaaatttcaattcttcattcagcattccattggaagatcttaatgagcaaaatattacggaaaatataattaatgttgataaatgcctggaaaattacgatgaaatagcagtagatgaaaaattcgaaaaattattggtaaatggcgtaaaagtatcagacagaagattaattgaaaaaattcctgataacaaaacttatagagtctataatatggaaagaaagtttttaggtcttggaaatttaagtgaagaaggatttaaaataattaaattattaacctaggagaaatttatatggaagttttaaatgatagttttaagattaaacttaactgtagaacttatgttacaataggaagttttgatggcattcatatgggacatttaagtttaataaaaaaagcaatatctcttagtaaaaaaaataatactatgagtatgcttagcacatttaaagaacatcctcttaatgttataaataaatctattgttcctaaaatattaatggataatgaaaccaaaatagaaatattaaagtccattggtttagacattttaaatttttttgattttaatgaagaaataatgaaaatgatgccagaagactttatattaaatatgataaatcattataatatagacggtataataaccggatttaatcatcgatttgggtataagaattcaggagatatacatttattaaaaactttaagtgaaaaatatggttttgaactttatgtcttgcctccagtgtcttttaaaaatgacatggttagcagcactcgtataagaaactgtatatccgatggaaatatagaagaagcaaatcaaatgcttttgagacctttttcaattaaagccaaagttattcatggaagagaaattggcagacaaataggatttccaactgcaaatttaagttatgataataaatttatacttcctaaaataggagtgtactatactacagttgagtataataaaattacctataagggaataacgaacgttggcactaatccaactgtaaatggtgataaacttactattgaaacttatatcttagattttaatcaaaatatatatgatgaagaaattcgagtgaattttgtaaaaaaaatacgcgaccaaatcaagtttgaaagtatagaacaattgaaggttcagttggaaaaagataaaaaatttgcatataagcaataatattagataaatagtaatttacatttgaaaaaaactttgttatactattataaggaaccttatgctaagactatcgagactccgacgatattcttggaatagggggataatattttggaggtgttttacattggataaagcaaaaaaacaagagttaattgcaacatacagcagaaaggaaggagatacaggttctcctgaggttcagattgctttattatctgaaagaattaatcatttaactagtcatttaaaagaacataaaaaggatcatcactcaagaagaggtctttttatgatgattggtaaaagaagaagtcttttaaactatcttgaatctgttgatattgaaagatatcgtgacattataaaaaaattaggtttaagaaagtaaaagcagtgaaagatggagcggttaataccgctctattattttagaacacaaattataggaaatgaatttaaatattagtttatagatgtaccagaaagttttaaatagtttttcttctgatatatctataagctaagtttatatttgagttcctattaaatgtttaaaattaaactctatatttttaactatatacataaatcaaaaaaaactttttatactattaacgtaaattcatatagggaggtaaattatatgttacattttttagaaacagatattgccggaagaaaacttaaagttgaatgtggcaaaactggtatgctttcaaactgtgctatgttcataagttacggcgatactgttgtaatggttaatgtcaatgcctcagaaaagccaagagaaggtattgatttctttcctttgagtattgaatacgaagaaagacaatattcagtaggaaaaatacctgggggatttgtaaaaagagaaggtagaccttctgaaaaatctatcttacatgcaagagctatagatagacctttaagaccattgtttcctaaagggtacagaaatgatgttcaggtggtatgtactgtaatgtctgtagagcaggataacttaccagaaatacttgctatgaacggtgcatcaatggctctatgtttatctgatattccatttacaacacctgttgctacagtatctgttgggtgtattgatggtaaatttgttttaaatcctacattagaggaaagagaaaaaagttctcttgatttaactgtttgtgccacaaatgaaagagtaatgatgttagaggctggtgccgatgaaattcctgaggatttaatgattgctgcaatagattttggatttaatgcttgtcaagatatagtcgcttttcaagaaaaagcaatgaaagaattcggaaaagaaaaggttaccccagaattatatcatcctaaagaagaaattgaaaaagacgttactgaatttgcttttgaatctattaaggaaattatgtacataacggatagggatgaacgaaatttaagattaagagagataaaagaaaaaatatcaaatgagtttgcagaaaagtatcctgatgatggtgctgatatagatgaagttgtatatacacttcaaaagaaggtcgttagaaatatgttattaaaagaacatagaagacctgacggaagaagatttgatgaaataagacctataagttgtgatgtagatcttttgcctagaacccatggaagtggtttatttacaagaggtttaacacaggttatgacggttacaactttaggaccaattggcgatgctcaagttatagatggtttaggagtagaggaatctaaacgatatatgcatcattataacttcccaccatattctacaggagaagttaaaccattaagaggaccaaatagaagagagataggtcatggagctcttgctgagaaagccctagtgccattaataccatctgaagaagaatttccgtatacaataagacttgtgtcagaagttttaagttcaaatggttcaacatcccaagcaagtgtatgtggaagtactttagcactcatggatgcaggtgtaccaataaagagaccagcagccggaatagctatgggacttataacaagtgaagatctttcaaaagaagctgttattacagacatacaaggcttagaagacttttttggcgatatggattttaaagttgcaggtactgagaaaggtataacagcaattcaagttgatacaaaaatacatggtttatctaagtactgtataaaaactgcaataaatgatgctagaaaagctagattatttatactcgaaaaaatggttgcatgcataaatgaacctagaaaagaattatcaacatatgcaccaagagcgtatactataaatatagatacagataaaataagaactcttataggaactggcggaaaaacaatcaataaaataattgaggaaactggtgttaaaatagacattagagaagatggaactgtatttgttctatctagtgatgcagattcagctaacagggcgttaaagatgattgatgatcttacaaaagatgttaaagtaggagaagtttatttaggaaaagtaaccaagataactaacttcggagcttttgttgaagtgctcccaggtaaggaaggtcttgtccatatatcaaaacttgatataaataaagtaaataaagtagaagatgtagtttcagttggcgatgagatactagttaaagttactgatatagataatcaaggaagagtaaatttatcaagaaaagatgtattaaaacaacaagaatcaaataattctaaagaaaaataatcaactaacaatagaagggcttaattgcctttttatttttatcatatttaaatgaaggttataaatttatgtataaaaacatactattttaataatacttttttaaatatggagggttgattatgaatgataatgttaaatactatagtgaagttgaaaagtatgaaattattaatataaatgacggagaaaagtatgctactgtttctaataatgatataattattgatgatagtggaaaaatgatttccttgataattgggaataataatacaggcttttctttgtttagtaaaaatgaattttttgaagttgagtggcaatatataaagaaaataggtgccagaaccataattatggacgtagacaattctgtaatgaaaaaaaatcgtttataatttggaggaatattatgaaaatcatagtacaaaaatttgggggaacatctgtatctacgccagaaagaagatcttttgttgtacaaaaggtatcgtcggctattaaggaaggctatagtcctattgttgttgtctcagcaatgggaagagcaggtgaaccttatgctaccgatactcttttatctcttattgacaatgattttaaggaaacaaataaacgggcttcagatttattaatgtgctgtggtgaaattataagcactgtaataatgagtaatgaacttaaaagagcaaaaatagcggcaattcctgtaacaggtggccaggcaggtattataacagatgatgagtatagtaatgcctctgttaaaaaagtaaatcctgaaaatcttttaaagcttttatgtcataatgaggttcctgttgtagctggatttcaagggaaaagccaaaatggtttttttacaactttagggcgaggtggaagtgatgtaactgcctctctaattggatgcgcagttaatgcagaaaagatagaaatatatacagatgtagatggaatcatgactgcagatcctagaattgtacaagatgcagctttaatagaaactataagctataacgaggtatttgagtttgcagaacaaggtgcaaaagtaattcatccaagagctgttgaagttgcaatgaatggcaatataccacttataataaaaaacactctaaatgattgcaaaggcactctaataaatagagaaggagatagtttaaataaaaatcttataactggtataacttctctaagtggacgagttcaagtaacaacaaaatttaaggattctaaaataaaatcaacagaatttctaagtttattaggagaaagaaatataaatatagatttgataaacgtgtttcctaaagaaaatatatttactatagataaaaaagatttaaataaacttaaagatacactcataaaaactaaagtgcaatattatttagaagatgattgtagtaaaattgctattattggaaatagaatttgtggtgtgcctggtgttatggcaaaaattttaaaagctattacaaaagaaggcatagaagtacttcaaactgctgattcacacacaacaatatggtgtcttgtaaagtccaatgttagaaataaagccatcaatgcgcttcatagagagtttaatttaaataataagtaataagtagtaagtatactttatgtaaacctgcacacaataattatagtgcaggagggatttaaatgaatgatgagcaaacttcaaataataacaacaatactaatgacaatgttaataatgataacgttacaaacaccgaagcaggaagtgaattagaatttatacaaattattggtcaaatcgaaggacatgggatattatcttctcaaacaaaaacaacaaaatatgaagaaattattcctcgacttatgaatgtagagtataacccagaaataaagggtgttcttataatactaaatacaattggaggagatgttgaggctggtcttgctatagctgaaatgataagaagtttaagcaaaccaacagtatctcttgttatcggaggaggacattcaattggagttcctctcgccacctcatcaaattactcctttatttcaccaacagctactatgataatacatccaataagaatgaatggtcttattataggtgtacctcaaacttttcagtactttaataaaatgcaggaaagaatatctgaattcatagttagaacttccaaaataaaaaaagaaaccttaacagagcttatgctaaaaacggatgaacttttaaatgatatgggaacaattctaataggaaaacaagcagtaaagtatggtttgattgacagtgttggaggaataaaagaagctttaagcaaacttaaggaacttatagaagacagtacaccataggtgagttatccctatggttactataaaaattaataataacgtacatattatattagaggtgatatatttgccaaggaataaacaatataaaaaaaataagcaagataaaatttctgaaactactttaaacagtgacatagcaggtatatcgatttttgcctttggagcatttgccgcagtaagtatgttttttaccagttttacaggaatcattggtaatggtatgaagaaacttttatttacacttgtaggcataggtgcatatatatttcctatattattgatgtttataggtgtttgttatttgataaaaaaaggaaaaataacttttagtaaaagattttacggagttaatataattattataaacacccttatgcttatacaaatgcagaaattatccttgtactataatggtaatattttagacggaataaagaaaatatatgaatcatctgatacatttcatggaggggtaatttcttatattcttgatgttccaatatataaactctttggtaaaggatactttgtgttatttataactctatacattatatcttttcttttggtttctgaaaaatcggcaggagaaattataagagaaaatcttaaaaagaaacctttaaagaaaactaagccttctgtagatgaaactaaaactatggattatgaaaatgataataaagataaggatgaaactttagccaaaaagattagtagtaagataaaaattgttgattttatgaaaaatgagggaaatgtagatagtaataagggacaagcattagaggaaattgcggtgtatgattctgcagaaaaaaatgagaatgaaagtaaagtaataggtgctgaacttgaagatgctataggacaaacctcctccaataattctgatataacctatgagtttcctccaattagtttattgaatgtgaacgagacttctaaactaaagaagagcgacaaaaaggaattattatctagtgcagaaaaacttactgaaaccttaaatagttttggtgtagatgcaaaagttatacaagtttcaaaaggtccttctgtaacaagatacgagcttcaacctagcgctggagttaaggttagtaaaataattaacctctcagatgatatagcattaaatttagctgcttcaggagttagaattgaagctccaataccaggaaaatctgctataggtattgaagttccaaataaagatttaactgctgtttttttaagtgaagtaatacaatcagaaactttctcaaactcaaagtcaaatttagcttttgcattaggtaaagatataggtggaaattgtgttgttactgatttaacaaaaatgccgcatcttttaatagctggtgcaactggttcaggaaaaagtgtatgtataaatactcttataataagcttactttacaaatgtgctccaacagatgtaaagcttcttatgatagatcctaaggtagttgaattgagtgtttacaatggtattcctcatcttctaattccagttgtaactaatcctaaaaaagcagcaggtgcattaaattgggcagtaaatgaaatgactaaaagatataaactgtttgctgaaaacaatgttagaaatatagaaggatacaacgatttatatactaaaaataaggttgaaagtaaactgccatggattgttataataattgatgagttggcagatttaatgatggtttgtccaaatgatgttgaagactatataggaagactagctcaaatggctagagcagctggtatgcaccttgtaatagctactcaaagaccatctgttgacgtaataacaggggttataaaggctaacattccatctagaatttcttttgcagtatctagtcaaatagattcgcgtactattttggatacttcaggtgcagaaaagcttttaggaaaaggagatatgcttttcaatccagttggagaatctaagccaattagaatacagggagcctttataaatgaggaagaggttgaaagagttgttggtttcataaggaatgaaagtactgaaactcaatataaagaagagataatagagcaaattaatagtaatgtttcaaaatctgagggcgatgaggatgaacttttagaagaagcattaaaaataattatagaaacaaaacaagcatcaacatcacttatacagagaaaacttagaattgggtacaatagagctgcaagaataatggatcaattagaggaaaaaggttatatatctgcaaaagatggaaccaaacctagaaatattttggtagacaaggatgatttataaaatttacattaaataatttaaaaatccttgttaaattgtttgtaaagtaataaaatataatttgtatttaacgtgtcactaggaggaaaaactttggataaattaaaatttggtttagttagtttaggttgtgataaaaatagagtagatagtgaaatcatacttggttctatgaatagagattatgaaatcgtaaatgatcctagagaagctgatgtaattcttgtgaatacttgtgggtttatagaatctgccaagcaggagtcaataaatacaatacttgaaatgaataaatataaagaaaagtataattgcaaaatgctaattgcaactggctgcttaacccaaagatatggtaaagaattaaaagaacttgtacctgaaattgatgctatactaggagtaaatgattataagagtttggatgatgctatagaggatttttttaatttaggaaaaaaagatatctactgtaattatagtgatcaatctataaatgaaggaaaaagaattataactacaggtgaatattcatcttatgttagaatctcagaaggatgtaataattcttgctcttattgtataataccaaaaattcgaggaaaatatagaagtagacaatttgaaaatattattgatgaggtaagagaattatcggagaacggaacaaaagaagtgattcttatagctcaagatactactagatatggtgtagacttatatggaagaaagaggctacatgagctattaaaagaaatgtcattaattcaaggtattgaatggataagaatcatgtattgctatcctgaagaaataacagaggaacttatagaagaaatagcctctaatgaaaaagtgtgcaattatatagatatgcctattcaacatataagtgataatattttgaaaaatatgtttagaaaaacaagaaaatcggagatattagataaagttgaaaaaataagaaaaaaagtgcctaatatagccataagaacatctcttatagttggtttccctggagaaacagaaggtgattttaatgaattatgtgattttgtaaaagatgctaacattaataatcttggagtttttagatactcaagagaagaaggaacaaaagcggcattaatgccaatgcaaatagctgatacggtaaaagaaaaaagagaagaagatataatgcttattcaacagcaggtatctaaaaatttaaatgctaaaaagattggcaaagtttacaaagttatagttgaggggtttaatggtgattattggtatggtagaaatttcgagatggctcctgagatagatggtaaagttttttttaagtctcaatcggagattaaagttggaagcttcattaatataaaaatcacagagaacctagaatatgatttaataggggttgtgtataatgaatttagcaaataaattaactttaatgaggatttttttagttcctgtttttctaatattcattgtagtacgtcagattccatatggaagaagtatagctacagctattttcataattgctgcaataacggataaactggacggctatatagcaagaagtagaaatcaggtaactaaatttggtaagataatggatccacttgcagataagcttttggtatcttctgcactgatagctttagtagaatttcatgtaataccagcatggattgctattgtaataatagctagagaatttgcagtaacaggacttaggagtgttgcagcaggtgaaggaattgtaattgctgcaagttggtggggaaaaatcaaaacctttattcaaatagtgacaataatatttgcacttttattcataaatttaaggaaaaattacgattttagaaaatttgtagatcaatttgctttacttagcaaccattctgctcaggtagagaaatttttaagatatggtacggatataacactggctatagcctttattgtaactcttatttcaggaatagattacttttacaagaataggcatgtatttataaatgataaataatgatttattttgcataaaatggatataatatattaaaaaggttccttatttaagggacttttattatattatattgacaaattaataaattactatataattatatgtatagaacaaatgttcgagagaaaggttggtgaacccttaagggatatatatggataatgaaaaattaaaagccattgatgcggctatgagtcagatagagaaacaatttggaaaaggcgctataatgaaacttggtgagcaagacatcttaaatattgatgcaatttcaacaggatgtttatctttagatatagcacttggaataggtggagttccacgtggaagagtagttgagatatatggacctgaatcatcaggtaaaactacagttgcacttcatatattagctgaagcccaaaagaagggtggagctgctgcatttattgatgccgagcatgctttagatcctcaatatgcaagagctttaggagtagatatagataacttagttgtatctcaaccagatactggtgagcaggcacttgaaattgctgaagcacttgttaggtcaggtgcaattgatgtaattgttgtagattctgtagcagcacttgtaccaaaagctgaaattgaaggtgaaatgggagattctcatgtaggtcttcaggcaagacttatgtcacaagctcttagaaaattaacaggttctataaacaagtctaaatgtatagctatatttataaaccaacttagagaaaaagttggaataatgtttggaaatcctgaaactactcctggaggaagagctcttaagttttatgcttctgtaagaatggatataagaaaaatagacactataaaacagggcgaagaaatgattggaaatagagtaagagtaaaggtagttaaaaataaagtggctcctccatttaaacaagcagaatttgatattatgtataatgaaggtatatctcgtgaaggaaatatagttgatgtaggagttaaagaaaatatcatccaaaaaagtggtgcatggttctcatatggtgatataagacttggtcagggaagagaaaatgctaaattattctttaaagaaaatatagatattagatctgaagttgaaaataaaataagagaaaagtacgatttacctatacaaaaagttaaaaatgaaaagccaaagattgaaaaaggaactgaaaataatacaaaataaaaggaaggttgtagtattgctacaaccttccttaataatttcttgtaaactctttaataatactatatcttgacataaccaataaattaatatacaattatctcatatacaaatactggtttagcatattcaaatggttgccaattgaataatatgacaccttttcatagcttcattaattttactttataattcagcaatataagcaaaggggtgttttaggcaatgaataatactaataaattaataattactatagtttgtttagttattataataactatagttgaaatgtatatcagaagaaaatatgcttgggctaaaatttctaaggccgaagaagatgcaaagaaaataaaagaagacgcaaaaagagaagccgagacactaaaaaaagaggctactttggaagctaaagaagaagcacataggctaagatcagatctggataaagaaaccagagaaagaagaaatgaaattcaaagacttgaaagaaggaatcttcaaagagaagagaccttagacaaaaaaaatgatttgcttgaaaagagagaaaacggtcttaatgaacgtgaaaactcaatacaagaaaggcagaacactatagaacagctctataaagaagaacgagaaaagctagaacagctttccggtttgacttctgaagaggcaaaaaatttacttttagaagaagttaatagagaaattaaacatgaaaaatctataatgattaaagaagtagaacaaaaagctaaagaagaagcagacaaaaaagcaagagaaattattacgtatgctattcaaagatgtgcagctgatcacgttgcagaatcaacagtttacgttgtatctcttcctaatgatgaaatgaaaggtagaataataggtagagagggtagaaatatacgtgcaattgaaacccttaccggtgtggatttgattatagatgatactccagaagctgttattttatcaggatttgatccagtaagaagagaagttgctaaagttgctcttgagaagctgatacttgatggaagaattcatcctgctagaattgaagaaatggttgagaaggcaaaaaaagaggttgaaaataatattaaagaagaaggcgaacaggctactttcgagacaggtgttcacggtttacatagtgagttaactagacttcttggaagattgaagtatagaaccagttatgggcaaaatgttttaaaacattccatagaggtatcttatcttgctggctttatggctgcagagcttggaattgatccaacttttgctaaaagagctggtctccttcacgatattggtaaagcagtagatcatgaagttgaaggacctcacgctttaataggtgcagaagtttctaaaaaatatcatgaacttcctcttattgtaaatgcaataggagctcatcatggtgatgtagagccacaatcattagaagctattttagttcaggcagcagatgccatatcagcagctagacctggagcaagacgtgaaacattagaagcatacattaagagattagagaaattagaagaaatagctaattcttatgaaggtgtagagaagtcatatgccattcaggctggaagagaaatcaggattatggttaaaccagaaacagttgacgatgcgggttcaatagagatggcaagaggtattgttaagaagattgaagaacaattggaataccctggtcaaatcaaagtaaatgttattagggaaactcgcgcagttgaatatgcaaaataaaaccaaaaattagattcaaatggaaaatcctttcaatataaaaattgaagggatttttgtttttaaaaagtttttttatcttttccatttttttaggaggaattttttattatatgtagaattatatacctatacaaataaaaaatatataaatataaaaaattatactatttatttactaacttaggagggttattatggaagtattaaaagtttcagcaaaatcaaatccaaattctgtagcaggagctttagcaggggttttaagagaaagaggtgctgccgaaatacaagctataggagcaggagcaattaatcaagcaattaaggcaatagcaatagcaaggggatttgttgcaccaagtggaattgatcttgtatgtattccagctttcactgacattgacatagatggggaggaaagaacagcgattaaacttatagttcaacctagataataatttagattttttaaagagactttgaattttataaagtctcttttatttatgataaaaatgtgttaaattattctttgaagataattttttggaggaataatatgaaaaaaattgacgtaaaagctatgattgcacttatgagaccaaaacaatggacaaaaaatgtttttgtttttgcagcaattatattttctagaaggtttacaaatacaaacttacttttaaataatctaattatttttcttgtattttgtttcacttcttctagtgtatacatttttaatgatataatagatgcagataaggacagacaacacccagacaaaaagaatagaccaatagctagtggaaaagttacaaaaacgcatggaataattttagatatagtaattcttttatcactttcaattattacatatagaattgacataaaaatacttgcagtaattttaatctacgttgtaatgaacattttctactcttttaaattaaaaaatgtagtaataatagatgttatgataataactgctggatttgttttaagggttgaaagtggaagtataatatcaaaagtagaattatctccatggctcatcttatgcactatactactttctctattcttagcattaaacaaaagaaaaggtgaaataatagcactaaaagaaaaaagtactacaacaagaaaaatacttaaggaatattccatagatttaatcgacaaaatgcttactatagttacaccatcaatattaattgcatactgtttatacagctttagttccgtgcagggtaagagtatgatgattacaattccttttgtattatatggtatatttagataccaatatttaatggaaaaagaaaatgcaggtgcaaagccagaagatgtttttattaaagataaaccttttttaataaacgttatttgttggtgcataacagcaatagtagtgctttattttaaaatataagtttataattaaaaatataaatgagtttggaggaaataataaatgaatttttctaagaaagccggacaaatagcagcttccataacattagagataaccgcaaaggctgatgaaatgaaagcaaatggaataaatgtaataggatttggtgctggacagccagattttaataccccaaaaaatataagagatgcagctatatatgctatagaaaatgggtatactaaatatacacctgtttcaggaatcaaggaactaaaaatggctatatgcgataaatttaaaagagataataatttaaactattctttatctaatattatagtttcaactggagctaaacaatgcttatcagatacattttcagcattattaaatccaggtgacgaggttatattaagtgcaccatattgggtaacctatcctgaactaataaaattaaatgatggtatttctgtaattataaatactacagaagaaaatcactttaaactatcagttgatgacttagaaaatgcgtatacaagtaaaactaaagctatacttataaatagcccttcaaatccaacaggaacagtatatacagaaactgagcttaaagctatagctgagtttgcaaaagaaaaggatttattcattatctctgatgaaatatatgaaaaattaatctatgatggtgagagacatgtaagtatagctagtttaagccaggatgcttttaatagaacagttgttataaatggtatgtctaagtcctacgctatgacaggatggagattaggctatgctgcttcaggatcatctgaatttataaaactaatgtcccatatacaagctcatactacatcaaatgcaaattctataactcaatatgcaagcgtagaggcgttaaatggacgccaagaagaattacattcaatggtaactgaatttgaaaaaagaagaacttatatgtctaaaagagttaacaacataactggaatacactgcttgttgccaaagggcgctttttacg
